United States Patent Application Publication US 2026/0347805 A1 - sequence listing, part 2

SEQ ID NO: 2596 - protein, 774 aa, synthetic construct
MILDTDLITEDGKPVIRIFKKENGEFKIEYDRTFEWYFYALLKDDSAIEEVKKITAERHGTVVTVKRVEKVQKKFLGRPVEVWKLYFTHPQDIPAIHDKIREHPAVIDIYEYDIPFAKRYLIDKGLVPMEGDEELKMLAFDIETLYHEGEEFAEGPILMISYADEEGARVITWKNVDLPYVDVVSTEREMIKRFLRVVKEKDPDVLITYNGDNFDFAYLKKRCEKLGINFALGRDGSEPKIQRMGDRFAVEVKGRIHFDLYPVIRRTINLPTYTLEAVYEAVFGQPKEKVYAEEITTAWETGENLERVARYSMEDAKVTYELGKEFLPMEAQLSRLIGQSLWDVSRSSTGNLVEWFLLRKAYERNELAPNKPDEKELARRRQSYEGGYVKEPERGLWENIVYLDFRSLYPSIIITHNVSPDTLNREGCKEYDVAPQVGHRFCKDFPGFIPSLLGDLLEERQKIKKKMKATIDPIERKLLDYRQRAIKILANSYYGYYGYARARWYCKECAESVTAWGREYITMTIKEIEEKYGFKVIYSDTDGFFATIPGADAETVKKKAMEFLKYINAKLPGALELEYEGFYKRGFFVTKKKYAVIDEEGKITTRGLEIVRRDWSEIAKETQARVLEALLKDGDVEKAVRIVKEVTEKLSKYEVPPEKLVIHEQITRDLKDYKATGPHVAVAKRLAARGVKIRPGTVISYIVLKGSGRIGDRAIPFDEFDPTKHKYDAEYYIENQVLPAVERILRAFGYRKEDLRYQKTRQVGLSAWLKPKGT

SEQ ID NO: 2597 - protein, 774 aa, synthetic construct
MILDTDLITEDGKPVIRIFKKENGEFKIEYDRTFEWYFYALLKDDSAIEEVKKITAERHGTVVTVKRVEKVQKKFLGRPVEVWKLYFTHPQDKPAIRDKIREHPAVIDIYEYDIPFAKRYLIDKGLVPMEGDEELKMLAFDIETLYHEGEEFAEGPILMISYADEEGARVITWKNVDLPYVDVVSTEREMIKRFLRVVKEKDPDVLITYNGDNFDFAYLKKRCEKLGINFALGRDGSEPKIQRMGDRFAVEVKGRIHFDLYPVIRRTINLPTYTLEAVYEAVFGQPKEKVYAEEITTAWETGENLERVARYSMEDAKVTYELGKEFLPMEAQLSRLIGQSLWDVSRSSTGNLVEWFLLRKAYERNELAPNKPDEKELARRRQSYEGGYVKEPERGLWENIVYLDFRSLYPSIIITHNVSPDTLNREGCKEYDVAPQVGHRFCKDFPGFIPSLLGDLLEERQKIKKKMKATIDPIERKLLDYRQRAIKILANSYYGYYGYARARWYCKECAESVTAWGREYITMTIKEIEEKYGFKVIYSDTDGFFATIPGADAETVKKKAMEFLKYINAKLPGALELEYEGFYKRGFFVTKKKYAVIDEEGKITTRGLEIVRRDWSEIAKETQARVLEALLKDGDVEKAVRIVKEVTEKLSKYEVPPEKLVIHEQITRDLKDYKATGPHVAVAKRLAARGVKIRPGTVISYIVLKGSGRIGDRAIPFDEFDPTKHKYDAEYYIENQVLPAVERILRAFGYRKEDLRYQKTRQVGLSAWLKPKGT

SEQ ID NO: 2598 - protein, 774 aa, synthetic construct
MILDTDLITEDGKPVIRIFKKENGEFKIEYDRTFEWYFYALLKDDSAIEEVKKITAERHGTVVTVKRVEKVQKKFLGRPVEVWKLYFTHPQDQPAIRDKIREHPAVIDIYEYDIPFAKRYLIDKGLVPMEGDEELKMLAFDIETLYHEGEEFAEGPILMISYADEEGARVITWKNVDLPYVDVVSTEREMIKRFLRVVKEKDPDVLITYNGDNFDFAYLKKRCEKLGINFALGRDGSEPKIQRMGDRFAVEVKGRIHFDLYPVIRRTINLPTYTLEAVYEAVFGQPKEKVYAEEITTAWETGENLERVARYSMEDAKVTYELGKEFLPMEAQLSRLIGQSLWDVSRSSTGNLVEWFLLRKAYERNELAPNKPDEKELARRRQSYEGGYVKEPERGLWENIVYLDFRSLYPSIIITHNVSPDTLNREGCKEYDVAPQVGHRFCKDFPGFIPSLLGDLLEERQKIKKKMKATIDPIERKLLDYRQRAIKILANSYYGYYGYARARWYCKECAESVTAWGREYITMTIKEIEEKYGFKVIYSDTDGFFATIPGADAETVKKKAMEFLKYINAKLPGALELEYEGFYKRGFFVTKKKYAVIDEEGKITTRGLEIVRRDWSEIAKETQARVLEALLKDGDVEKAVRIVKEVTEKLSKYEVPPEKLVIHEQITRDLKDYKATGPHVAVAKRLAARGVKIRPGTVISYIVLKGSGRIGDRAIPFDEFDPTKHKYDAEYYIENQVLPAVERILRAFGYRKEDLRYQKTRQVGLSAWLKPKGT

SEQ ID NO: 2599 - protein, 774 aa, synthetic construct
MILDTDLITEDGKPVIRIFKKENGEFKIEYDRTFEWYFYALLKDDSAIEEVKKITAERHGTVVTVKRVEKVQKKFLGRPVEVWKLYFTHPQDRPAIRDKIREHPAVIDIYEYDIPFAKRYLIDKGLVPMEGDEELKMLAFDIETLYHEGEEFAEGPILMISYADEEGARVITWKNVDLPYVDVVSTEREMIKRFLRVVKEKDPDVLITYNGDNFDFAYLKKRCEKLGINFALGRDGSEPKIQRMGDRFAVEVKGRIHFDLYPVIRRTINLPTYTLEAVYEAVFGQPKEKVYAEEITTAWETGENLERVARYSMEDAKVTYELGKEFLPMEAQLSRLIGQSLWDVSRSSTGNLVEWFLLRKAYERNELAPNKPDEKELARRRQSYEGGYVKEPERGLWENIVYLDFRSLYPSIIITHNVSPDTLNREGCKEYDVAPQVGHRFCKDFPGFIPSLLGDLLEERQKIKKKMKATIDPIERKLLDYRQRAIKILANSYYGYYGYARARWYCKECAESVTAWGREYITMTIKEIEEKYGFKVIYSDTDGFFATIPGADAETVKKKAMEFLKYINAKLPGALELEYEGFYKRGFFVTKKKYAVIDEEGKITTRGLEIVRRDWSEIAKETQARVLEALLKDGDVEKAVRIVKEVTEKLSKYEVPPEKLVIHEQITRDLKDYKATGPHVAVAKRLAARGVKIRPGTVISYIVLKGSGRIGDRAIPFDEFDPTKHKYDAEYYIENQVLPAVERILRAFGYRKEDLRYQKTRQVGLSAWLKPKGT

SEQ ID NO: 2600 - protein, 774 aa, synthetic construct
MILDTDLITEDGKPVIRIFKKENGEFKIEYDRTFEWYFYALLKDDSAIEEVKKITAERHGTVVTVKRVEKVQKKFLGRPVEVWKLYFTHPQDRPAIADKIREHPAVIDIYEYDIPFAKRYLIDKGLVPMEGDEELKMLAFDIETLYHEGEEFAEGPILMISYADEEGARVITWKNVDLPYVDVVSTEREMIKRFLRVVKEKDPDVLITYNGDNFDFAYLKKRCEKLGINFALGRDGSEPKIQRMGDRFAVEVKGRIHFDLYPVIRRTINLPTYTLEAVYEAVFGQPKEKVYAEEITTAWETGENLERVARYSMEDAKVTYELGKEFLPMEAQLSRLIGQSLWDVSRSSTGNLVEWFLLRKAYERNELAPNKPDEKELARRRQSYEGGYVKEPERGLWENIVYLDFRSLYPSIIITHNVSPDTLNREGCKEYDVAPQVGHRFCKDFPGFIPSLLGDLLEERQKIKKKMKATIDPIERKLLDYRQRAIKILANSYYGYYGYARARWYCKECAESVTAWGREYITMTIKEIEEKYGFKVIYSDTDGFFATIPGADAETVKKKAMEFLKYINAKLPGALELEYEGFYKRGFFVTKKKYAVIDEEGKITTRGLEIVRRDWSEIAKETQARVLEALLKDGDVEKAVRIVKEVTEKLSKYEVPPEKLVIHEQITRDLKDYKATGPHVAVAKRLAARGVKIRPGTVISYIVLKGSGRIGDRAIPFDEFDPTKHKYDAEYYIENQVLPAVERILRAFGYRKEDLRYQKTRQVGLSAWLKPKGT

SEQ ID NO: 2601 - protein, 774 aa, synthetic construct
MILDTDLITEDGKPVIRIFKKENGEFKIEYDRTFEWYFYALLKDDSAIEEVKKITAERHGTVVTVKRVEKVQKKFLGRPVEVWKLYFTHPQDRPAIFDKIREHPAVIDIYEYDIPFAKRYLIDKGLVPMEGDEELKMLAFDIETLYHEGEEFAEGPILMISYADEEGARVITWKNVDLPYVDVVSTEREMIKRFLRVVKEKDPDVLITYNGDNFDFAYLKKRCEKLGINFALGRDGSEPKIQRMGDRFAVEVKGRIHFDLYPVIRRTINLPTYTLEAVYEAVFGQPKEKVYAEEITTAWETGENLERVARYSMEDAKVTYELGKEFLPMEAQLSRLIGQSLWDVSRSSTGNLVEWFLLRKAYERNELAPNKPDEKELARRRQSYEGGYVKEPERGLWENIVYLDFRSLYPSIIITHNVSPDTLNREGCKEYDVAPQVGHRFCKDFPGFIPSLLGDLLEERQKIKKKMKATIDPIERKLLDYRQRAIKILANSYYGYYGYARARWYCKECAESVTAWGREYITMTIKEIEEKYGFKVIYSDTDGFFATIPGADAETVKKKAMEFLKYINAKLPGALELEYEGFYKRGFFVTKKKYAVIDEEGKITTRGLEIVRRDWSEIAKETQARVLEALLKDGDVEKAVRIVKEVTEKLSKYEVPPEKLVIHEQITRDLKDYKATGPHVAVAKRLAARGVKIRPGTVISYIVLKGSGRIGDRAIPFDEFDPTKHKYDAEYYIENQVLPAVERILRAFGYRKEDLRYQKTRQVGLSAWLKPKGT

SEQ ID NO: 2602 - protein, 774 aa, synthetic construct
MILDTDLITEDGKPVIRIFKKENGEFKIEYDRTFEPYFYALLKDDSAIEEVKKITAERHGTVVTVKRVEKVQKKFLGRPVEVWKLYFTHFQDVPAIRDKIREHPAVIDIYEYDIPFAKRYLIDKGLVPMEGDEELKMLAFDIETLYHEGEEFAEGPILMISYADEEGARVITWKNVDLPYVDVVSTEREMIKRFLRVVKEKDPDVLITYNGDNFDFAYLKKRCEKLGINFALGRDGSEPKIQRMGDRFAVEVKGRIHFDLYPVIRRTINLPTYTLEAVYEAVFGQPKEKVYAEEITTAWETGENLERVARYSMEDAKVTYELGKEFLPMEAQLSRLIGQSLWDVSRSSTGNLVEWFLLRKAYERNELAPNKPDEKELARRRQSYEGGYVKEPERGLWENIVYLDFRSLYPSIIITHNVSPDTLNREGCKEYDVAPQVGHRFCKDFPGFIPSLLGDLLEERQKIKKKMKATIDPIERKLLDYRQRAIKILANSYYGYYGYARARWYCKECAESVTAWGREYITMTIKEIEEKYGFKVIYSDTDGFFATIPGADAETVKKKAMEFLKYINAKLPGALELEYEGFYKRGFFVTKKKYAVIDEEGKITTRGLEIVRRDWSEIAKETQARVLEALLKDGDVEKAVRIVKEVTEKLSKYEVPPEKLVIHEQITRDLKDYKATGPHVAVAKRLAARGVKIRPGTVISYIVLKGSGRIGDRAIPFDEFDPTKHKYDAEYYIENQVLPAVERILRAFGYRKEDLRYQKTRQVGLSAWLKPKGT

SEQ ID NO: 2603 - protein, 774 aa, synthetic construct
MILDTDLITEDGKPVIRIFKKENGEFKIEYDRTFEPYFYALLKDDSAIEEVKKITAERHGTVVTVKRVEKVQKKFLGRPVEVWKLYFTHFQDVPAIADKIREHPAVIDIYEYDIPFAKRYLIDKGLVPMEGDEELKMLAFDIETLYHEGEEFAEGPILMISYADEEGARVITWKNVDLPYVDVVSTEREMIKRFLRVVKEKDPDVLITYNGDNFDFAYLKKRCEKLGINFALGRDGSEPKIQRMGDRFAVEVKGRIHFDLYPVIRRTINLPTYTLEAVYEAVFGQPKEKVYAEEITTAWETGENLERVARYSMEDAKVTYELGKEFLPMEAQLSRLIGQSLWDVSRSSTGNLVEWFLLRKAYERNELAPNKPDEKELARRRQSYEGGYVKEPERGLWENIVYLDFRSLYPSIIITHNVSPDTLNREGCKEYDVAPQVGHRFCKDFPGFIPSLLGDLLEERQKIKKKMKATIDPIERKLLDYRQRAIKILANSYYGYYGYARARWYCKECAESVTAWGREYITMTIKEIEEKYGFKVIYSDTDGFFATIPGADAETVKKKAMEFLKYINAKLPGALELEYEGFYKRGFFVTKKKYAVIDEEGKITTRGLEIVRRDWSEIAKETQARVLEALLKDGDVEKAVRIVKEVTEKLSKYEVPPEKLVIHEQITRDLKDYKATGPHVAVAKRLAARGVKIRPGTVISYIVLKGSGRIGDRAIPFDEFDPTKHKYDAEYYIENQVLPAVERILRAFGYRKEDLRYQKTRQVGLSAWLKPKGT

SEQ ID NO: 2604 - protein, 774 aa, synthetic construct
MILDTDLITEDGKPVIRIFKKENGEFKIEYDRTFEPYFYALLKDDSAIEEVKKITAERHGTVVTVKRVEKVQKKFLGRPVEVWKLYFTHFQDVPAIFDKIREHPAVIDIYEYDIPFAKRYLIDKGLVPMEGDEELKMLAFDIETLYHEGEEFAEGPILMISYADEEGARVITWKNVDLPYVDVVSTEREMIKRFLRVVKEKDPDVLITYNGDNFDFAYLKKRCEKLGINFALGRDGSEPKIQRMGDRFAVEVKGRIHFDLYPVIRRTINLPTYTLEAVYEAVFGQPKEKVYAEEITTAWETGENLERVARYSMEDAKVTYELGKEFLPMEAQLSRLIGQSLWDVSRSSTGNLVEWFLLRKAYERNELAPNKPDEKELARRRQSYEGGYVKEPERGLWENIVYLDFRSLYPSIIITHNVSPDTLNREGCKEYDVAPQVGHRFCKDFPGFIPSLLGDLLEERQKIKKKMKATIDPIERKLLDYRQRAIKILANSYYGYYGYARARWYCKECAESVTAWGREYITMTIKEIEEKYGFKVIYSDTDGFFATIPGADAETVKKKAMEFLKYINAKLPGALELEYEGFYKRGFFVTKKKYAVIDEEGKITTRGLEIVRRDWSEIAKETQARVLEALLKDGDVEKAVRIVKEVTEKLSKYEVPPEKLVIHEQITRDLKDYKATGPHVAVAKRLAARGVKIRPGTVISYIVLKGSGRIGDRAIPFDEFDPTKHKYDAEYYIENQVLPAVERILRAFGYRKEDLRYQKTRQVGLSAWLKPKGT

SEQ ID NO: 2605 - protein, 774 aa, synthetic construct
MILDTDLITEDGKPVIRIFKKENGEFKIEYDRTFEPYFYALLKDDSAIEEVKKITAERHGTVVTVKRVEKVQKKFLGRPVEVWKLYFTHFQDVPAIHDKIREHPAVIDIYEYDIPFAKRYLIDKGLVPMEGDEELKMLAFDIETLYHEGEEFAEGPILMISYADEEGARVITWKNVDLPYVDVVSTEREMIKRFLRVVKEKDPDVLITYNGDNFDFAYLKKRCEKLGINFALGRDGSEPKIQRMGDRFAVEVKGRIHFDLYPVIRRTINLPTYTLEAVYEAVFGQPKEKVYAEEITTAWETGENLERVARYSMEDAKVTYELGKEFLPMEAQLSRLIGQSLWDVSRSSTGNLVEWFLLRKAYERNELAPNKPDEKELARRRQSYEGGYVKEPERGLWENIVYLDFRSLYPSIIITHNVSPDTLNREGCKEYDVAPQVGHRFCKDFPGFIPSLLGDLLEERQKIKKKMKATIDPIERKLLDYRQRAIKILANSYYGYYGYARARWYCKECAESVTAWGREYITMTIKEIEEKYGFKVIYSDTDGFFATIPGADAETVKKKAMEFLKYINAKLPGALELEYEGFYKRGFFVTKKKYAVIDEEGKITTRGLEIVRRDWSEIAKETQARVLEALLKDGDVEKAVRIVKEVTEKLSKYEVPPEKLVIHEQITRDLKDYKATGPHVAVAKRLAARGVKIRPGTVISYIVLKGSGRIGDRAIPFDEFDPTKHKYDAEYYIENQVLPAVERILRAFGYRKEDLRYQKTRQVGLSAWLKPKGT

SEQ ID NO: 2606 - protein, 774 aa, synthetic construct
MILDTDLITEDGKPVIRIFKKENGEFKIEYDRTFEPYFYALLKDDSAIEEVKKITAERHGTVVTVKRVEKVQKKFLGRPVEVWKLYFTHFQDVPAIWDKIREHPAVIDIYEYDIPFAKRYLIDKGLVPMEGDEELKMLAFDIETLYHEGEEFAEGPILMISYADEEGARVITWKNVDLPYVDVVSTEREMIKRFLRVVKEKDPDVLITYNGDNFDFAYLKKRCEKLGINFALGRDGSEPKIQRMGDRFAVEVKGRIHFDLYPVIRRTINLPTYTLEAVYEAVFGQPKEKVYAEEITTAWETGENLERVARYSMEDAKVTYELGKEFLPMEAQLSRLIGQSLWDVSRSSTGNLVEWFLLRKAYERNELAPNKPDEKELARRRQSYEGGYVKEPERGLWENIVYLDFRSLYPSIIITHNVSPDTLNREGCKEYDVAPQVGHRFCKDFPGFIPSLLGDLLEERQKIKKKMKATIDPIERKLLDYRQRAIKILANSYYGYYGYARARWYCKECAESVTAWGREYITMTIKEIEEKYGFKVIYSDTDGFFATIPGADAETVKKKAMEFLKYINAKLPGALELEYEGFYKRGFFVTKKKYAVIDEEGKITTRGLEIVRRDWSEIAKETQARVLEALLKDGDVEKAVRIVKEVTEKLSKYEVPPEKLVIHEQITRDLKDYKATGPHVAVAKRLAARGVKIRPGTVISYIVLKGSGRIGDRAIPFDEFDPTKHKYDAEYYIENQVLPAVERILRAFGYRKEDLRYQKTRQVGLSAWLKPKGT

SEQ ID NO: 2607 - protein, 774 aa, synthetic construct
MILDTDLITEDGKPVIRIFKKENGEFKIEYDRTFEPYFYALLKDDSAIEEVKKITAERHGTVVTVKRVEKVQKKFLGRPVEVWKLYFTHFQDEPAIFDKIREHPAVIDIYEYDIPFAKRYLIDKGLVPMEGDEELKMLAFDIETLYHEGEEFAEGPILMISYADEEGARVITWKNVDLPYVDVVSTEREMIKRFLRVVKEKDPDVLITYNGDNFDFAYLKKRCEKLGINFALGRDGSEPKIQRMGDRFAVEVKGRIHFDLYPVIRRTINLPTYTLEAVYEAVFGQPKEKVYAEEITTAWETGENLERVARYSMEDAKVTYELGKEFLPMEAQLSRLIGQSLWDVSRSSTGNLVEWFLLRKAYERNELAPNKPDEKELARRRQSYEGGYVKEPERGLWENIVYLDFRSLYPSIIITHNVSPDTLNREGCKEYDVAPQVGHRFCKDFPGFIPSLLGDLLEERQKIKKKMKATIDPIERKLLDYRQRAIKILANSYYGYYGYARARWYCKECAESVTAWGREYITMTIKEIEEKYGFKVIYSDTDGFFATIPGADAETVKKKAMEFLKYINAKLPGALELEYEGFYKRGFFVTKKKYAVIDEEGKITTRGLEIVRRDWSEIAKETQARVLEALLKDGDVEKAVRIVKEVTEKLSKYEVPPEKLVIHEQITRDLKDYKATGPHVAVAKRLAARGVKIRPGTVISYIVLKGSGRIGDRAIPFDEFDPTKHKYDAEYYIENQVLPAVERILRAFGYRKEDLRYQKTRQVGLSAWLKPKGT

SEQ ID NO: 2608 - protein, 774 aa, synthetic construct
MILDTDLITEDGKPVIRIFKKENGEFKIEYDRTFEPYFYALLKDDSAIEEVKKITAERHGTVVTVKRVEKVQKKFLGRPVEVWKLYFTHFQDIPAIRDKIREHPAVIDIYEYDIPFAKRYLIDKGLVPMEGDEELKMLAFDIETLYHEGEEFAEGPILMISYADEEGARVITWKNVDLPYVDVVSTEREMIKRFLRVVKEKDPDVLITYNGDNFDFAYLKKRCEKLGINFALGRDGSEPKIQRMGDRFAVEVKGRIHFDLYPVIRRTINLPTYTLEAVYEAVFGQPKEKVYAEEITTAWETGENLERVARYSMEDAKVTYELGKEFLPMEAQLSRLIGQSLWDVSRSSTGNLVEWFLLRKAYERNELAPNKPDEKELARRRQSYEGGYVKEPERGLWENIVYLDFRSLYPSIIITHNVSPDTLNREGCKEYDVAPQVGHRFCKDFPGFIPSLLGDLLEERQKIKKKMKATIDPIERKLLDYRQRAIKILANSYYGYYGYARARWYCKECAESVTAWGREYITMTIKEIEEKYGFKVIYSDTDGFFATIPGADAETVKKKAMEFLKYINAKLPGALELEYEGFYKRGFFVTKKKYAVIDEEGKITTRGLEIVRRDWSEIAKETQARVLEALLKDGDVEKAVRIVKEVTEKLSKYEVPPEKLVIHEQITRDLKDYKATGPHVAVAKRLAARGVKIRPGTVISYIVLKGSGRIGDRAIPFDEFDPTKHKYDAEYYIENQVLPAVERILRAFGYRKEDLRYQKTRQVGLSAWLKPKGT

SEQ ID NO: 2609 - protein, 774 aa, synthetic construct
MILDTDLITEDGKPVIRIFKKENGEFKIEYDRTFEPYFYALLKDDSAIEEVKKITAERHGTVVTVKRVEKVQKKFLGRPVEVWKLYFTHFQDIPAIADKIREHPAVIDIYEYDIPFAKRYLIDKGLVPMEGDEELKMLAFDIETLYHEGEEFAEGPILMISYADEEGARVITWKNVDLPYVDVVSTEREMIKRFLRVVKEKDPDVLITYNGDNFDFAYLKKRCEKLGINFALGRDGSEPKIQRMGDRFAVEVKGRIHFDLYPVIRRTINLPTYTLEAVYEAVFGQPKEKVYAEEITTAWETGENLERVARYSMEDAKVTYELGKEFLPMEAQLSRLIGQSLWDVSRSSTGNLVEWFLLRKAYERNELAPNKPDEKELARRRQSYEGGYVKEPERGLWENIVYLDFRSLYPSIIITHNVSPDTLNREGCKEYDVAPQVGHRFCKDFPGFIPSLLGDLLEERQKIKKKMKATIDPIERKLLDYRQRAIKILANSYYGYYGYARARWYCKECAESVTAWGREYITMTIKEIEEKYGFKVIYSDTDGFFATIPGADAETVKKKAMEFLKYINAKLPGALELEYEGFYKRGFFVTKKKYAVIDEEGKITTRGLEIVRRDWSEIAKETQARVLEALLKDGDVEKAVRIVKEVTEKLSKYEVPPEKLVIHEQITRDLKDYKATGPHVAVAKRLAARGVKIRPGTVISYIVLKGSGRIGDRAIPFDEFDPTKHKYDAEYYIENQVLPAVERILRAFGYRKEDLRYQKTRQVGLSAWLKPKGT

SEQ ID NO: 2610 - protein, 774 aa, synthetic construct
MILDTDLITEDGKPVIRIFKKENGEFKIEYDRTFEPYFYALLKDDSAIEEVKKITAERHGTVVTVKRVEKVQKKFLGRPVEVWKLYFTHFQDIPAIFDKIREHPAVIDIYEYDIPFAKRYLIDKGLVPMEGDEELKMLAFDIETLYHEGEEFAEGPILMISYADEEGARVITWKNVDLPYVDVVSTEREMIKRFLRVVKEKDPDVLITYNGDNFDFAYLKKRCEKLGINFALGRDGSEPKIQRMGDRFAVEVKGRIHFDLYPVIRRTINLPTYTLEAVYEAVFGQPKEKVYAEEITTAWETGENLERVARYSMEDAKVTYELGKEFLPMEAQLSRLIGQSLWDVSRSSTGNLVEWFLLRKAYERNELAPNKPDEKELARRRQSYEGGYVKEPERGLWENIVYLDFRSLYPSIIITHNVSPDTLNREGCKEYDVAPQVGHRFCKDFPGFIPSLLGDLLEERQKIKKKMKATIDPIERKLLDYRQRAIKILANSYYGYYGYARARWYCKECAESVTAWGREYITMTIKEIEEKYGFKVIYSDTDGFFATIPGADAETVKKKAMEFLKYINAKLPGALELEYEGFYKRGFFVTKKKYAVIDEEGKITTRGLEIVRRDWSEIAKETQARVLEALLKDGDVEKAVRIVKEVTEKLSKYEVPPEKLVIHEQITRDLKDYKATGPHVAVAKRLAARGVKIRPGTVISYIVLKGSGRIGDRAIPFDEFDPTKHKYDAEYYIENQVLPAVERILRAFGYRKEDLRYQKTRQVGLSAWLKPKGT

SEQ ID NO: 2611 - protein, 774 aa, synthetic construct
MILDTDLITEDGKPVIRIFKKENGEFKIEYDRTFEPYFYALLKDDSAIEEVKKITAERHGTVVTVKRVEKVQKKFLGRPVEVWKLYFTHFQDIPAIHDKIREHPAVIDIYEYDIPFAKRYLIDKGLVPMEGDEELKMLAFDIETLYHEGEEFAEGPILMISYADEEGARVITWKNVDLPYVDVVSTEREMIKRFLRVVKEKDPDVLITYNGDNFDFAYLKKRCEKLGINFALGRDGSEPKIQRMGDRFAVEVKGRIHFDLYPVIRRTINLPTYTLEAVYEAVFGQPKEKVYAEEITTAWETGENLERVARYSMEDAKVTYELGKEFLPMEAQLSRLIGQSLWDVSRSSTGNLVEWFLLRKAYERNELAPNKPDEKELARRRQSYEGGYVKEPERGLWENIVYLDFRSLYPSIIITHNVSPDTLNREGCKEYDVAPQVGHRFCKDFPGFIPSLLGDLLEERQKIKKKMKATIDPIERKLLDYRQRAIKILANSYYGYYGYARARWYCKECAESVTAWGREYITMTIKEIEEKYGFKVIYSDTDGFFATIPGADAETVKKKAMEFLKYINAKLPGALELEYEGFYKRGFFVTKKKYAVIDEEGKITTRGLEIVRRDWSEIAKETQARVLEALLKDGDVEKAVRIVKEVTEKLSKYEVPPEKLVIHEQITRDLKDYKATGPHVAVAKRLAARGVKIRPGTVISYIVLKGSGRIGDRAIPFDEFDPTKHKYDAEYYIENQVLPAVERILRAFGYRKEDLRYQKTRQVGLSAWLKPKGT

SEQ ID NO: 2612 - protein, 774 aa, synthetic construct
MILDTDLITEDGKPVIRIFKKENGEFKIEYDRTFEPYFYALLKDDSAIEEVKKITAERHGTVVTVKRVEKVQKKFLGRPVEVWKLYFTHFQDIPAIWDKIREHPAVIDIYEYDIPFAKRYLIDKGLVPMEGDEELKMLAFDIETLYHEGEEFAEGPILMISYADEEGARVITWKNVDLPYVDVVSTEREMIKRFLRVVKEKDPDVLITYNGDNFDFAYLKKRCEKLGINFALGRDGSEPKIQRMGDRFAVEVKGRIHFDLYPVIRRTINLPTYTLEAVYEAVFGQPKEKVYAEEITTAWETGENLERVARYSMEDAKVTYELGKEFLPMEAQLSRLIGQSLWDVSRSSTGNLVEWFLLRKAYERNELAPNKPDEKELARRRQSYEGGYVKEPERGLWENIVYLDFRSLYPSIIITHNVSPDTLNREGCKEYDVAPQVGHRFCKDFPGFIPSLLGDLLEERQKIKKKMKATIDPIERKLLDYRQRAIKILANSYYGYYGYARARWYCKECAESVTAWGREYITMTIKEIEEKYGFKVIYSDTDGFFATIPGADAETVKKKAMEFLKYINAKLPGALELEYEGFYKRGFFVTKKKYAVIDEEGKITTRGLEIVRRDWSEIAKETQARVLEALLKDGDVEKAVRIVKEVTEKLSKYEVPPEKLVIHEQITRDLKDYKATGPHVAVAKRLAARGVKIRPGTVISYIVLKGSGRIGDRAIPFDEFDPTKHKYDAEYYIENQVLPAVERILRAFGYRKEDLRYQKTRQVGLSAWLKPKGT

SEQ ID NO: 2613 - protein, 774 aa, synthetic construct
MILDTDLITEDGKPVIRIFKKENGEFKIEYDRTFEPYFYALLKDDSAIEEVKKITAERHGTVVTVKRVEKVQKKFLGRPVEVWKLYFTHFQDKPAIRDKIREHPAVIDIYEYDIPFAKRYLIDKGLVPMEGDEELKMLAFDIETLYHEGEEFAEGPILMISYADEEGARVITWKNVDLPYVDVVSTEREMIKRFLRVVKEKDPDVLITYNGDNFDFAYLKKRCEKLGINFALGRDGSEPKIQRMGDRFAVEVKGRIHFDLYPVIRRTINLPTYTLEAVYEAVFGQPKEKVYAEEITTAWETGENLERVARYSMEDAKVTYELGKEFLPMEAQLSRLIGQSLWDVSRSSTGNLVEWFLLRKAYERNELAPNKPDEKELARRRQSYEGGYVKEPERGLWENIVYLDFRSLYPSIIITHNVSPDTLNREGCKEYDVAPQVGHRFCKDFPGFIPSLLGDLLEERQKIKKKMKATIDPIERKLLDYRQRAIKILANSYYGYYGYARARWYCKECAESVTAWGREYITMTIKEIEEKYGFKVIYSDTDGFFATIPGADAETVKKKAMEFLKYINAKLPGALELEYEGFYKRGFFVTKKKYAVIDEEGKITTRGLEIVRRDWSEIAKETQARVLEALLKDGDVEKAVRIVKEVTEKLSKYEVPPEKLVIHEQITRDLKDYKATGPHVAVAKRLAARGVKIRPGTVISYIVLKGSGRIGDRAIPFDEFDPTKHKYDAEYYIENQVLPAVERILRAFGYRKEDLRYQKTRQVGLSAWLKPKGT

SEQ ID NO: 2614 - protein, 774 aa, synthetic construct
MILDTDLITEDGKPVIRIFKKENGEFKIEYDRTFEPYFYALLKDDSAIEEVKKITAERHGTVVTVKRVEKVQKKFLGRPVEVWKLYFTHFQDKPAIADKIREHPAVIDIYEYDIPFAKRYLIDKGLVPMEGDEELKMLAFDIETLYHEGEEFAEGPILMISYADEEGARVITWKNVDLPYVDVVSTEREMIKRFLRVVKEKDPDVLITYNGDNFDFAYLKKRCEKLGINFALGRDGSEPKIQRMGDRFAVEVKGRIHFDLYPVIRRTINLPTYTLEAVYEAVFGQPKEKVYAEEITTAWETGENLERVARYSMEDAKVTYELGKEFLPMEAQLSRLIGQSLWDVSRSSTGNLVEWFLLRKAYERNELAPNKPDEKELARRRQSYEGGYVKEPERGLWENIVYLDFRSLYPSIIITHNVSPDTLNREGCKEYDVAPQVGHRFCKDFPGFIPSLLGDLLEERQKIKKKMKATIDPIERKLLDYRQRAIKILANSYYGYYGYARARWYCKECAESVTAWGREYITMTIKEIEEKYGFKVIYSDTDGFFATIPGADAETVKKKAMEFLKYINAKLPGALELEYEGFYKRGFFVTKKKYAVIDEEGKITTRGLEIVRRDWSEIAKETQARVLEALLKDGDVEKAVRIVKEVTEKLSKYEVPPEKLVIHEQITRDLKDYKATGPHVAVAKRLAARGVKIRPGTVISYIVLKGSGRIGDRAIPFDEFDPTKHKYDAEYYIENQVLPAVERILRAFGYRKEDLRYQKTRQVGLSAWLKPKGT

SEQ ID NO: 2615 - protein, 774 aa, synthetic construct
MILDTDLITEDGKPVIRIFKKENGEFKIEYDRTFEPYFYALLKDDSAIEEVKKITAERHGTVVTVKRVEKVQKKFLGRPVEVWKLYFTHFQDKPAIFDKIREHPAVIDIYEYDIPFAKRYLIDKGLVPMEGDEELKMLAFDIETLYHEGEEFAEGPILMISYADEEGARVITWKNVDLPYVDVVSTEREMIKRFLRVVKEKDPDVLITYNGDNFDFAYLKKRCEKLGINFALGRDGSEPKIQRMGDRFAVEVKGRIHFDLYPVIRRTINLPTYTLEAVYEAVFGQPKEKVYAEEITTAWETGENLERVARYSMEDAKVTYELGKEFLPMEAQLSRLIGQSLWDVSRSSTGNLVEWFLLRKAYERNELAPNKPDEKELARRRQSYEGGYVKEPERGLWENIVYLDFRSLYPSIIITHNVSPDTLNREGCKEYDVAPQVGHRFCKDFPGFIPSLLGDLLEERQKIKKKMKATIDPIERKLLDYRQRAIKILANSYYGYYGYARARWYCKECAESVTAWGREYITMTIKEIEEKYGFKVIYSDTDGFFATIPGADAETVKKKAMEFLKYINAKLPGALELEYEGFYKRGFFVTKKKYAVIDEEGKITTRGLEIVRRDWSEIAKETQARVLEALLKDGDVEKAVRIVKEVTEKLSKYEVPPEKLVIHEQITRDLKDYKATGPHVAVAKRLAARGVKIRPGTVISYIVLKGSGRIGDRAIPFDEFDPTKHKYDAEYYIENQVLPAVERILRAFGYRKEDLRYQKTRQVGLSAWLKPKGT

SEQ ID NO: 2616 - protein, 774 aa, synthetic construct
MILDTDLITEDGKPVIRIFKKENGEFKIEYDRTFEPYFYALLKDDSAIEEVKKITAERHGTVVTVKRVEKVQKKFLGRPVEVWKLYFTHFQDKPAIFDKIREHPAVIDIYEYDIPFAKQYLIDKGLVPMEGDEELKMLAFDIETLYHEGEEFAEGPILMISYADEEGARVITWKNVDLPYVDVVSTEREMIKRFLRVVKEKDPDVLITYNGDNFDFAYLKKRCEKLGINFALGRDGSEPKIQRMGDRFAVEVKGRIHFDLYPVIRRTINLPTYTLEAVYEAVFGQPKEKVYAEEITTAWETGENLERVARYSMEDAKVTYELGKEFLPMEAQLSRLIGQSLWDVSRSSTGNLVEWFLLRKAYERNELAPNKPDEKELARRRQSYEGGYVKEPERGLWENIVYLDFRSLYPSIIITHNVSPDTLNREGCKEYDVAPQVGHRFCKDFPGFIPSLLGDLLEERQKIKKKMKATIDPIERKLLDYRQRAIKILANSYYGYYGYARARWYCKECAESVTAWGREYITMTIKEIEEKYGFKVIYSDTDGFFATIPGADAETVKKKAMEFLKYINAKLPGALELEYEGFYKRGFFVTKKKYAVIDEEGKITTRGLEIVRRDWSEIAKETQARVLEALLKDGDVEKAVRIVKEVTEKLSKYEVPPEKLVIHEQITRDLKDYKATGPHVAVAKRLAARGVKIRPGTVISYIVLKGSGRIGDRAIPFDEFDPTKHKYDAEYYIENQVLPAVERILRAFGYRKEDLRYQKTRQVGLSAWLKPKGT

SEQ ID NO: 2617 - protein, 774 aa, synthetic construct
MILDTDLITEDGKPVIRIFKKENGEFKIEYDRTFEPYFYALLKDDSAIEEVKKITAERHGTVVTVKRVEKVQKKFLGRPVEVWKLYFTHFQDQPAIRDKIREHPAVIDIYEYDIPFAKRYLIDKGLVPMEGDEELKMLAFDIETLYHEGEEFAEGPILMISYADEEGARVITWKNVDLPYVDVVSTEREMIKRFLRVVKEKDPDVLITYNGDNFDFAYLKKRCEKLGINFALGRDGSEPKIQRMGDRFAVEVKGRIHFDLYPVIRRTINLPTYTLEAVYEAVFGQPKEKVYAEEITTAWETGENLERVARYSMEDAKVTYELGKEFLPMEAQLSRLIGQSLWDVSRSSTGNLVEWFLLRKAYERNELAPNKPDEKELARRRQSYEGGYVKEPERGLWENIVYLDFRSLYPSIIITHNVSPDTLNREGCKEYDVAPQVGHRFCKDFPGFIPSLLGDLLEERQKIKKKMKATIDPIERKLLDYRQRAIKILANSYYGYYGYARARWYCKECAESVTAWGREYITMTIKEIEEKYGFKVIYSDTDGFFATIPGADAETVKKKAMEFLKYINAKLPGALELEYEGFYKRGFFVTKKKYAVIDEEGKITTRGLEIVRRDWSEIAKETQARVLEALLKDGDVEKAVRIVKEVTEKLSKYEVPPEKLVIHEQITRDLKDYKATGPHVAVAKRLAARGVKIRPGTVISYIVLKGSGRIGDRAIPFDEFDPTKHKYDAEYYIENQVLPAVERILRAFGYRKEDLRYQKTRQVGLSAWLKPKGT

SEQ ID NO: 2618 - protein, 774 aa, synthetic construct
MILDTDLITEDGKPVIRIFKKENGEFKIEYDRTFEPYFYALLKDDSAIEEVKKITAERHGTVVTVKRVEKVQKKFLGRPVEVWKLYFTHFQDQPAIHDKIREHPAVIDIYEYDIPFAKRYLIDKGLVPMEGDEELKMLAFDIETLYHEGEEFAEGPILMISYADEEGARVITWKNVDLPYVDVVSTEREMIKRFLRVVKEKDPDVLITYNGDNFDFAYLKKRCEKLGINFALGRDGSEPKIQRMGDRFAVEVKGRIHFDLYPVIRRTINLPTYTLEAVYEAVFGQPKEKVYAEEITTAWETGENLERVARYSMEDAKVTYELGKEFLPMEAQLSRLIGQSLWDVSRSSTGNLVEWFLLRKAYERNELAPNKPDEKELARRRQSYEGGYVKEPERGLWENIVYLDFRSLYPSIIITHNVSPDTLNREGCKEYDVAPQVGHRFCKDFPGFIPSLLGDLLEERQKIKKKMKATIDPIERKLLDYRQRAIKILANSYYGYYGYARARWYCKECAESVTAWGREYITMTIKEIEEKYGFKVIYSDTDGFFATIPGADAETVKKKAMEFLKYINAKLPGALELEYEGFYKRGFFVTKKKYAVIDEEGKITTRGLEIVRRDWSEIAKETQARVLEALLKDGDVEKAVRIVKEVTEKLSKYEVPPEKLVIHEQITRDLKDYKATGPHVAVAKRLAARGVKIRPGTVISYIVLKGSGRIGDRAIPFDEFDPTKHKYDAEYYIENQVLPAVERILRAFGYRKEDLRYQKTRQVGLSAWLKPKGT

SEQ ID NO: 2619 - protein, 774 aa, synthetic construct
MILDTDLITEDGKPVIRIFKKENGEFKIEYDRTFEPYFYALLKDDSAIEEVKKITAERHGTVVTVKRVEKVQKKFLGRPVEVWKLYFTHFQDRPAIRDKIREHPAVIDIYEYDIPFAKRYLIDKGLVPMEGDEELKMLAFDIETLYHEGEEFAEGPILMISYADEEGARVITWKNVDLPYVDVVSTEREMIKRFLRVVKEKDPDVLITYNGDNFDFAYLKKRCEKLGINFALGRDGSEPKIQRMGDRFAVEVKGRIHFDLYPVIRRTINLPTYTLEAVYEAVFGQPKEKVYAEEITTAWETGENLERVARYSMEDAKVTYELGKEFLPMEAQLSRLIGQSLWDVSRSSTGNLVEWFLLRKAYERNELAPNKPDEKELARRRQSYEGGYVKEPERGLWENIVYLDFRSLYPSIIITHNVSPDTLNREGCKEYDVAPQVGHRFCKDFPGFIPSLLGDLLEERQKIKKKMKATIDPIERKLLDYRQRAIKILANSYYGYYGYARARWYCKECAESVTAWGREYITMTIKEIEEKYGFKVIYSDTDGFFATIPGADAETVKKKAMEFLKYINAKLPGALELEYEGFYKRGFFVTKKKYAVIDEEGKITTRGLEIVRRDWSEIAKETQARVLEALLKDGDVEKAVRIVKEVTEKLSKYEVPPEKLVIHEQITRDLKDYKATGPHVAVAKRLAARGVKIRPGTVISYIVLKGSGRIGDRAIPFDEFDPTKHKYDAEYYIENQVLPAVERILRAFGYRKEDLRYQKTRQVGLSAWLKPKGT

SEQ ID NO: 2620 - protein, 774 aa, synthetic construct
MILDTDLITEDGKPVIRIFKKENGEFKIEYDRTFEPYFYALLKDDSAIEEVKKITAERHGTVVTVKRVEKVQKKFLGRPVEVWKLYFTHFQDRPAIADKIREHPAVIDIYEYDIPFAKRYLIDKGLVPMEGDEELKMLAFDIETLYHEGEEFAEGPILMISYADEEGARVITWKNVDLPYVDVVSTEREMIKRFLRVVKEKDPDVLITYNGDNFDFAYLKKRCEKLGINFALGRDGSEPKIQRMGDRFAVEVKGRIHFDLYPVIRRTINLPTYTLEAVYEAVFGQPKEKVYAEEITTAWETGENLERVARYSMEDAKVTYELGKEFLPMEAQLSRLIGQSLWDVSRSSTGNLVEWFLLRKAYERNELAPNKPDEKELARRRQSYEGGYVKEPERGLWENIVYLDFRSLYPSIIITHNVSPDTLNREGCKEYDVAPQVGHRFCKDFPGFIPSLLGDLLEERQKIKKKMKATIDPIERKLLDYRQRAIKILANSYYGYYGYARARWYCKECAESVTAWGREYITMTIKEIEEKYGFKVIYSDTDGFFATIPGADAETVKKKAMEFLKYINAKLPGALELEYEGFYKRGFFVTKKKYAVIDEEGKITTRGLEIVRRDWSEIAKETQARVLEALLKDGDVEKAVRIVKEVTEKLSKYEVPPEKLVIHEQITRDLKDYKATGPHVAVAKRLAARGVKIRPGTVISYIVLKGSGRIGDRAIPFDEFDPTKHKYDAEYYIENQVLPAVERILRAFGYRKEDLRYQKTRQVGLSAWLKPKGT

SEQ ID NO: 2621 - protein, 774 aa, synthetic construct
MILDTDLITEDGKPVIRIFKKENGEFKIEYDRTFEPYFYALLKDDSAIEEVKKITAERHGTVVTVKRVEKVQKKFLGRPVEVWKLYFTHIQDVPAIRDKIREHPAVIDIYEYDIPFAKRYLIDKGLVPMEGDEELKMLAFDIETLYHEGEEFAEGPILMISYADEEGARVITWKNVDLPYVDVVSTEREMIKRFLRVVKEKDPDVLITYNGDNFDFAYLKKRCEKLGINFALGRDGSEPKIQRMGDRFAVEVKGRIHFDLYPVIRRTINLPTYTLEAVYEAVFGQPKEKVYAEEITTAWETGENLERVARYSMEDAKVTYELGKEFLPMEAQLSRLIGQSLWDVSRSSTGNLVEWFLLRKAYERNELAPNKPDEKELARRRQSYEGGYVKEPERGLWENIVYLDFRSLYPSIIITHNVSPDTLNREGCKEYDVAPQVGHRFCKDFPGFIPSLLGDLLEERQKIKKKMKATIDPIERKLLDYRQRAIKILANSYYGYYGYARARWYCKECAESVTAWGREYITMTIKEIEEKYGFKVIYSDTDGFFATIPGADAETVKKKAMEFLKYINAKLPGALELEYEGFYKRGFFVTKKKYAVIDEEGKITTRGLEIVRRDWSEIAKETQARVLEALLKDGDVEKAVRIVKEVTEKLSKYEVPPEKLVIHEQITRDLKDYKATGPHVAVAKRLAARGVKIRPGTVISYIVLKGSGRIGDRAIPFDEFDPTKHKYDAEYYIENQVLPAVERILRAFGYRKEDLRYQKTRQVGLSAWLKPKGT

SEQ ID NO: 2622 - protein, 774 aa, synthetic construct
MILDTDLITEDGKPVIRIFKKENGEFKIEYDRTFEPYFYALLKDDSAIEEVKKITAERHGTVVTVKRVEKVQKKFLGRPVEVWKLYFTHIQDVPAIFDKIREHPAVIDIYEYDIPFAKRYLIDKGLVPMEGDEELKMLAFDIETLYHEGEEFAEGPILMISYADEEGARVITWKNVDLPYVDVVSTEREMIKRFLRVVKEKDPDVLITYNGDNFDFAYLKKRCEKLGINFALGRDGSEPKIQRMGDRFAVEVKGRIHFDLYPVIRRTINLPTYTLEAVYEAVFGQPKEKVYAEEITTAWETGENLERVARYSMEDAKVTYELGKEFLPMEAQLSRLIGQSLWDVSRSSTGNLVEWFLLRKAYERNELAPNKPDEKELARRRQSYEGGYVKEPERGLWENIVYLDFRSLYPSIIITHNVSPDTLNREGCKEYDVAPQVGHRFCKDFPGFIPSLLGDLLEERQKIKKKMKATIDPIERKLLDYRQRAIKILANSYYGYYGYARARWYCKECAESVTAWGREYITMTIKEIEEKYGFKVIYSDTDGFFATIPGADAETVKKKAMEFLKYINAKLPGALELEYEGFYKRGFFVTKKKYAVIDEEGKITTRGLEIVRRDWSEIAKETQARVLEALLKDGDVEKAVRIVKEVTEKLSKYEVPPEKLVIHEQITRDLKDYKATGPHVAVAKRLAARGVKIRPGTVISYIVLKGSGRIGDRAIPFDEFDPTKHKYDAEYYIENQVLPAVERILRAFGYRKEDLRYQKTRQVGLSAWLKPKGT

SEQ ID NO: 2623 - protein, 774 aa, synthetic construct
MILDTDLITEDGKPVIRIFKKENGEFKIEYDRTFEPYFYALLKDDSAIEEVKKITAERHGTVVTVKRVEKVQKKFLGRPVEVWKLYFTHIQDVPAIHDKIREHPAVIDIYEYDIPFAKRYLIDKGLVPMEGDEELKMLAFDIETLYHEGEEFAEGPILMISYADEEGARVITWKNVDLPYVDVVSTEREMIKRFLRVVKEKDPDVLITYNGDNFDFAYLKKRCEKLGINFALGRDGSEPKIQRMGDRFAVEVKGRIHFDLYPVIRRTINLPTYTLEAVYEAVFGQPKEKVYAEEITTAWETGENLERVARYSMEDAKVTYELGKEFLPMEAQLSRLIGQSLWDVSRSSTGNLVEWFLLRKAYERNELAPNKPDEKELARRRQSYEGGYVKEPERGLWENIVYLDFRSLYPSIIITHNVSPDTLNREGCKEYDVAPQVGHRFCKDFPGFIPSLLGDLLEERQKIKKKMKATIDPIERKLLDYRQRAIKILANSYYGYYGYARARWYCKECAESVTAWGREYITMTIKEIEEKYGFKVIYSDTDGFFATIPGADAETVKKKAMEFLKYINAKLPGALELEYEGFYKRGFFVTKKKYAVIDEEGKITTRGLEIVRRDWSEIAKETQARVLEALLKDGDVEKAVRIVKEVTEKLSKYEVPPEKLVIHEQITRDLKDYKATGPHVAVAKRLAARGVKIRPGTVISYIVLKGSGRIGDRAIPFDEFDPTKHKYDAEYYIENQVLPAVERILRAFGYRKEDLRYQKTRQVGLSAWLKPKGT

SEQ ID NO: 2624 - protein, 774 aa, synthetic construct
MILDTDLITEDGKPVIRIFKKENGEFKIEYDRTFEPYFYALLKDDSAIEEVKKITAERHGTVVTVKRVEKVQKKFLGRPVEVWKLYFTHIQDVPAIWDKIREHPAVIDIYEYDIPFAKRYLIDKGLVPMEGDEELKMLAFDIETLYHEGEEFAEGPILMISYADEEGARVITWKNVDLPYVDVVSTEREMIKRFLRVVKEKDPDVLITYNGDNFDFAYLKKRCEKLGINFALGRDGSEPKIQRMGDRFAVEVKGRIHFDLYPVIRRTINLPTYTLEAVYEAVFGQPKEKVYAEEITTAWETGENLERVARYSMEDAKVTYELGKEFLPMEAQLSRLIGQSLWDVSRSSTGNLVEWFLLRKAYERNELAPNKPDEKELARRRQSYEGGYVKEPERGLWENIVYLDFRSLYPSIIITHNVSPDTLNREGCKEYDVAPQVGHRFCKDFPGFIPSLLGDLLEERQKIKKKMKATIDPIERKLLDYRQRAIKILANSYYGYYGYARARWYCKECAESVTAWGREYITMTIKEIEEKYGFKVIYSDTDGFFATIPGADAETVKKKAMEFLKYINAKLPGALELEYEGFYKRGFFVTKKKYAVIDEEGKITTRGLEIVRRDWSEIAKETQARVLEALLKDGDVEKAVRIVKEVTEKLSKYEVPPEKLVIHEQITRDLKDYKATGPHVAVAKRLAARGVKIRPGTVISYIVLKGSGRIGDRAIPFDEFDPTKHKYDAEYYIENQVLPAVERILRAFGYRKEDLRYQKTRQVGLSAWLKPKGT

SEQ ID NO: 2625 - protein, 774 aa, synthetic construct
MILDTDLITEDGKPVIRIFKKENGEFKIEYDRTFEPYFYALLKDDSAIEEVKKITAERHGTVVTVKRVEKVQKKFLGRPVEVWKLYFTHIQDIPAIRDKIREHPAVIDIYEYDIPFAKRYLIDKGLVPMEGDEELKMLAFDIETLYHEGEEFAEGPILMISYADEEGARVITWKNVDLPYVDVVSTEREMIKRFLRVVKEKDPDVLITYNGDNFDFAYLKKRCEKLGINFALGRDGSEPKIQRMGDRFAVEVKGRIHFDLYPVIRRTINLPTYTLEAVYEAVFGQPKEKVYAEEITTAWETGENLERVARYSMEDAKVTYELGKEFLPMEAQLSRLIGQSLWDVSRSSTGNLVEWFLLRKAYERNELAPNKPDEKELARRRQSYEGGYVKEPERGLWENIVYLDFRSLYPSIIITHNVSPDTLNREGCKEYDVAPQVGHRFCKDFPGFIPSLLGDLLEERQKIKKKMKATIDPIERKLLDYRQRAIKILANSYYGYYGYARARWYCKECAESVTAWGREYITMTIKEIEEKYGFKVIYSDTDGFFATIPGADAETVKKKAMEFLKYINAKLPGALELEYEGFYKRGFFVTKKKYAVIDEEGKITTRGLEIVRRDWSEIAKETQARVLEALLKDGDVEKAVRIVKEVTEKLSKYEVPPEKLVIHEQITRDLKDYKATGPHVAVAKRLAARGVKIRPGTVISYIVLKGSGRIGDRAIPFDEFDPTKHKYDAEYYIENQVLPAVERILRAFGYRKEDLRYQKTRQVGLSAWLKPKGT

SEQ ID NO: 2626 - protein, 774 aa, synthetic construct
MILDTDLITEDGKPVIRIFKKENGEFKIEYDRTFEPYFYALLKDDSAIEEVKKITAERHGTVVTVKRVEKVQKKFLGRPVEVWKLYFTHIQDIPAIHDKIREHPAVIDIYEYDIPFAKRYLIDKGLVPMEGDEELKMLAFDIETLYHEGEEFAEGPILMISYADEEGARVITWKNVDLPYVDVVSTEREMIKRFLRVVKEKDPDVLITYNGDNFDFAYLKKRCEKLGINFALGRDGSEPKIQRMGDRFAVEVKGRIHFDLYPVIRRTINLPTYTLEAVYEAVFGQPKEKVYAEEITTAWETGENLERVARYSMEDAKVTYELGKEFLPMEAQLSRLIGQSLWDVSRSSTGNLVEWFLLRKAYERNELAPNKPDEKELARRRQSYEGGYVKEPERGLWENIVYLDFRSLYPSIIITHNVSPDTLNREGCKEYDVAPQVGHRFCKDFPGFIPSLLGDLLEERQKIKKKMKATIDPIERKLLDYRQRAIKILANSYYGYYGYARARWYCKECAESVTAWGREYITMTIKEIEEKYGFKVIYSDTDGFFATIPGADAETVKKKAMEFLKYINAKLPGALELEYEGFYKRGFFVTKKKYAVIDEEGKITTRGLEIVRRDWSEIAKETQARVLEALLKDGDVEKAVRIVKEVTEKLSKYEVPPEKLVIHEQITRDLKDYKATGPHVAVAKRLAARGVKIRPGTVISYIVLKGSGRIGDRAIPFDEFDPTKHKYDAEYYIENQVLPAVERILRAFGYRKEDLRYQKTRQVGLSAWLKPKGT

SEQ ID NO: 2627 - protein, 774 aa, synthetic construct
MILDTDLITEDGKPVIRIFKKENGEFKIEYDRTFEPYFYALLKDDSAIEEVKKITAERHGTVVTVKRVEKVQKKFLGRPVEVWKLYFTHIQDIPAIWDKIREHPAVIDIYEYDIPFAKRYLIDKGLVPMEGDEELKMLAFDIETLYHEGEEFAEGPILMISYADEEGARVITWKNVDLPYVDVVSTEREMIKRFLRVVKEKDPDVLITYNGDNFDFAYLKKRCEKLGINFALGRDGSEPKIQRMGDRFAVEVKGRIHFDLYPVIRRTINLPTYTLEAVYEAVFGQPKEKVYAEEITTAWETGENLERVARYSMEDAKVTYELGKEFLPMEAQLSRLIGQSLWDVSRSSTGNLVEWFLLRKAYERNELAPNKPDEKELARRRQSYEGGYVKEPERGLWENIVYLDFRSLYPSIIITHNVSPDTLNREGCKEYDVAPQVGHRFCKDFPGFIPSLLGDLLEERQKIKKKMKATIDPIERKLLDYRQRAIKILANSYYGYYGYARARWYCKECAESVTAWGREYITMTIKEIEEKYGFKVIYSDTDGFFATIPGADAETVKKKAMEFLKYINAKLPGALELEYEGFYKRGFFVTKKKYAVIDEEGKITTRGLEIVRRDWSEIAKETQARVLEALLKDGDVEKAVRIVKEVTEKLSKYEVPPEKLVIHEQITRDLKDYKATGPHVAVAKRLAARGVKIRPGTVISYIVLKGSGRIGDRAIPFDEFDPTKHKYDAEYYIENQVLPAVERILRAFGYRKEDLRYQKTRQVGLSAWLKPKGT

SEQ ID NO: 2628 - protein, 774 aa, synthetic construct
MILDTDLITEDGKPVIRIFKKENGEFKIEYDRTFEPYFYALLKDDSAIEEVKKITAERHGTVVTVKRVEKVQKKFLGRPVEVWKLYFTHIQDKPAIFDKIREHPAVIDIYEYDIPFAKRYLIDKGLVPMEGDEELKMLAFDIETLYHEGEEFAEGPILMISYADEEGARVITWKNVDLPYVDVVSTEREMIKRFLRVVKEKDPDVLITYNGDNFDFAYLKKRCEKLGINFALGRDGSEPKIQRMGDRFAVEVKGRIHFDLYPVIRRTINLPTYTLEAVYEAVFGQPKEKVYAEEITTAWETGENLERVARYSMEDAKVTYELGKEFLPMEAQLSRLIGQSLWDVSRSSTGNLVEWFLLRKAYERNELAPNKPDEKELARRRQSYEGGYVKEPERGLWENIVYLDFRSLYPSIIITHNVSPDTLNREGCKEYDVAPQVGHRFCKDFPGFIPSLLGDLLEERQKIKKKMKATIDPIERKLLDYRQRAIKILANSYYGYYGYARARWYCKECAESVTAWGREYITMTIKEIEEKYGFKVIYSDTDGFFATIPGADAETVKKKAMEFLKYINAKLPGALELEYEGFYKRGFFVTKKKYAVIDEEGKITTRGLEIVRRDWSEIAKETQARVLEALLKDGDVEKAVRIVKEVTEKLSKYEVPPEKLVIHEQITRDLKDYKATGPHVAVAKRLAARGVKIRPGTVISYIVLKGSGRIGDRAIPFDEFDPTKHKYDAEYYIENQVLPAVERILRAFGYRKEDLRYQKTRQVGLSAWLKPKGT

SEQ ID NO: 2629 - protein, 774 aa, synthetic construct
MILDTDLITEDGKPVIRIFKKENGEFKIEYDRTFEPYFYALLKDDSAIEEVKKITAERHGTVVTVKRVEKVQKKFLGRPVEVWKLYFTHIQDQPAIRDKIREHPAVIDIYEYDIPFAKRYLIDKGLVPMEGDEELKMLAFDIETLYHEGEEFAEGPILMISYADEEGARVITWKNVDLPYVDVVSTEREMIKRFLRVVKEKDPDVLITYNGDNFDFAYLKKRCEKLGINFALGRDGSEPKIQRMGDRFAVEVKGRIHFDLYPVIRRTINLPTYTLEAVYEAVFGQPKEKVYAEEITTAWETGENLERVARYSMEDAKVTYELGKEFLPMEAQLSRLIGQSLWDVSRSSTGNLVEWFLLRKAYERNELAPNKPDEKELARRRQSYEGGYVKEPERGLWENIVYLDFRSLYPSIIITHNVSPDTLNREGCKEYDVAPQVGHRFCKDFPGFIPSLLGDLLEERQKIKKKMKATIDPIERKLLDYRQRAIKILANSYYGYYGYARARWYCKECAESVTAWGREYITMTIKEIEEKYGFKVIYSDTDGFFATIPGADAETVKKKAMEFLKYINAKLPGALELEYEGFYKRGFFVTKKKYAVIDEEGKITTRGLEIVRRDWSEIAKETQARVLEALLKDGDVEKAVRIVKEVTEKLSKYEVPPEKLVIHEQITRDLKDYKATGPHVAVAKRLAARGVKIRPGTVISYIVLKGSGRIGDRAIPFDEFDPTKHKYDAEYYIENQVLPAVERILRAFGYRKEDLRYQKTRQVGLSAWLKPKGT

SEQ ID NO: 2630 - protein, 774 aa, synthetic construct
MILDTDLITEDGKPVIRIFKKENGEFKIEYDRTFEPYFYALLKDDSAIEEVKKITAERHGTVVTVKRVEKVQKKFLGRPVEVWKLYFTHIQDRPAIRDKIREHPAVIDIYEYDIPFAKRYLIDKGLVPMEGDEELKMLAFDIETLYHEGEEFAEGPILMISYADEEGARVITWKNVDLPYVDVVSTEREMIKRFLRVVKEKDPDVLITYNGDNFDFAYLKKRCEKLGINFALGRDGSEPKIQRMGDRFAVEVKGRIHFDLYPVIRRTINLPTYTLEAVYEAVFGQPKEKVYAEEITTAWETGENLERVARYSMEDAKVTYELGKEFLPMEAQLSRLIGQSLWDVSRSSTGNLVEWFLLRKAYERNELAPNKPDEKELARRRQSYEGGYVKEPERGLWENIVYLDFRSLYPSIIITHNVSPDTLNREGCKEYDVAPQVGHRFCKDFPGFIPSLLGDLLEERQKIKKKMKATIDPIERKLLDYRQRAIKILANSYYGYYGYARARWYCKECAESVTAWGREYITMTIKEIEEKYGFKVIYSDTDGFFATIPGADAETVKKKAMEFLKYINAKLPGALELEYEGFYKRGFFVTKKKYAVIDEEGKITTRGLEIVRRDWSEIAKETQARVLEALLKDGDVEKAVRIVKEVTEKLSKYEVPPEKLVIHEQITRDLKDYKATGPHVAVAKRLAARGVKIRPGTVISYIVLKGSGRIGDRAIPFDEFDPTKHKYDAEYYIENQVLPAVERILRAFGYRKEDLRYQKTRQVGLSAWLKPKGT

SEQ ID NO: 2631 - protein, 774 aa, synthetic construct
MILDTDLITEDGKPVIRIFKKENGEFKIEYDRTFEPYFYALLKDDSAIEEVKKITAERHGTVVTVKRVEKVQKKFLGRPVEVWKLYFTHSQDVPAIRDKIREHPAVIDIYEYDIPFAKRYLIDKGLVPMEGDEELKMLAFDIETLYHEGEEFAEGPILMISYADEEGARVITWKNVDLPYVDVVSTEREMIKRFLRVVKEKDPDVLITYNGDNFDFAYLKKRCEKLGINFALGRDGSEPKIQRMGDRFAVEVKGRIHFDLYPVIRRTINLPTYTLEAVYEAVFGQPKEKVYAEEITTAWETGENLERVARYSMEDAKVTYELGKEFLPMEAQLSRLIGQSLWDVSRSSTGNLVEWFLLRKAYERNELAPNKPDEKELARRRQSYEGGYVKEPERGLWENIVYLDFRSLYPSIIITHNVSPDTLNREGCKEYDVAPQVGHRFCKDFPGFIPSLLGDLLEERQKIKKKMKATIDPIERKLLDYRQRAIKILANSYYGYYGYARARWYCKECAESVTAWGREYITMTIKEIEEKYGFKVIYSDTDGFFATIPGADAETVKKKAMEFLKYINAKLPGALELEYEGFYKRGFFVTKKKYAVIDEEGKITTRGLEIVRRDWSEIAKETQARVLEALLKDGDVEKAVRIVKEVTEKLSKYEVPPEKLVIHEQITRDLKDYKATGPHVAVAKRLAARGVKIRPGTVISYIVLKGSGRIGDRAIPFDEFDPTKHKYDAEYYIENQVLPAVERILRAFGYRKEDLRYQKTRQVGLSAWLKPKGT

SEQ ID NO: 2632 - protein, 774 aa, synthetic construct
MILDTDLITEDGKPVIRIFKKENGEFKIEYDRTFEPYFYALLKDDSAIEEVKKITAERHGTVVTVKRVEKVQKKFLGRPVEVWKLYFTHSQDIPAIHDKIREHPAVIDIYEYDIPFAKRYLIDKGLVPMEGDEELKMLAFDIETLYHEGEEFAEGPILMISYADEEGARVITWKNVDLPYVDVVSTEREMIKRFLRVVKEKDPDVLITYNGDNFDFAYLKKRCEKLGINFALGRDGSEPKIQRMGDRFAVEVKGRIHFDLYPVIRRTINLPTYTLEAVYEAVFGQPKEKVYAEEITTAWETGENLERVARYSMEDAKVTYELGKEFLPMEAQLSRLIGQSLWDVSRSSTGNLVEWFLLRKAYERNELAPNKPDEKELARRRQSYEGGYVKEPERGLWENIVYLDFRSLYPSIIITHNVSPDTLNREGCKEYDVAPQVGHRFCKDFPGFIPSLLGDLLEERQKIKKKMKATIDPIERKLLDYRQRAIKILANSYYGYYGYARARWYCKECAESVTAWGREYITMTIKEIEEKYGFKVIYSDTDGFFATIPGADAETVKKKAMEFLKYINAKLPGALELEYEGFYKRGFFVTKKKYAVIDEEGKITTRGLEIVRRDWSEIAKETQARVLEALLKDGDVEKAVRIVKEVTEKLSKYEVPPEKLVIHEQITRDLKDYKATGPHVAVAKRLAARGVKIRPGTVISYIVLKGSGRIGDRAIPFDEFDPTKHKYDAEYYIENQVLPAVERILRAFGYRKEDLRYQKTRQVGLSAWLKPKGT

SEQ ID NO: 2633 - protein, 774 aa, synthetic construct
MILDTDLITEDGKPVIRIFKKENGEFKIEYDRTFEPYFYALLKDDSAIEEVKKITAERHGTVVTVKRVEKVQKKFLGRPVEVWKLYFTHSQDRPAIHDKIREHPAVIDIYEYDIPFAKRYLIDKGLVPMEGDEELKMLAFDIETLYHEGEEFAEGPILMISYADEEGARVITWKNVDLPYVDVVSTEREMIKRFLRVVKEKDPDVLITYNGDNFDFAYLKKRCEKLGINFALGRDGSEPKIQRMGDRFAVEVKGRIHFDLYPVIRRTINLPTYTLEAVYEAVFGQPKEKVYAEEITTAWETGENLERVARYSMEDAKVTYELGKEFLPMEAQLSRLIGQSLWDVSRSSTGNLVEWFLLRKAYERNELAPNKPDEKELARRRQSYEGGYVKEPERGLWENIVYLDFRSLYPSIIITHNVSPDTLNREGCKEYDVAPQVGHRFCKDFPGFIPSLLGDLLEERQKIKKKMKATIDPIERKLLDYRQRAIKILANSYYGYYGYARARWYCKECAESVTAWGREYITMTIKEIEEKYGFKVIYSDTDGFFATIPGADAETVKKKAMEFLKYINAKLPGALELEYEGFYKRGFFVTKKKYAVIDEEGKITTRGLEIVRRDWSEIAKETQARVLEALLKDGDVEKAVRIVKEVTEKLSKYEVPPEKLVIHEQITRDLKDYKATGPHVAVAKRLAARGVKIRPGTVISYIVLKGSGRIGDRAIPFDEFDPTKHKYDAEYYIENQVLPAVERILRAFGYRKEDLRYQKTRQVGLSAWLKPKGT

SEQ ID NO: 2634 - protein, 774 aa, synthetic construct
MILDTDLITEDGKPVIRIFKKENGEFKIEYDRTFEPYFYALLKDDSAIEEVKKITAERHGTVVTVKRVEKVQKKFLGRPVEVWKLYFTHWQDVPAIADKIREHPAVIDIYEYDIPFAKRYLIDKGLVPMEGDEELKMLAFDIETLYHEGEEFAEGPILMISYADEEGARVITWKNVDLPYVDVVSTEREMIKRFLRVVKEKDPDVLITYNGDNFDFAYLKKRCEKLGINFALGRDGSEPKIQRMGDRFAVEVKGRIHFDLYPVIRRTINLPTYTLEAVYEAVFGQPKEKVYAEEITTAWETGENLERVARYSMEDAKVTYELGKEFLPMEAQLSRLIGQSLWDVSRSSTGNLVEWFLLRKAYERNELAPNKPDEKELARRRQSYEGGYVKEPERGLWENIVYLDFRSLYPSIIITHNVSPDTLNREGCKEYDVAPQVGHRFCKDFPGFIPSLLGDLLEERQKIKKKMKATIDPIERKLLDYRQRAIKILANSYYGYYGYARARWYCKECAESVTAWGREYITMTIKEIEEKYGFKVIYSDTDGFFATIPGADAETVKKKAMEFLKYINAKLPGALELEYEGFYKRGFFVTKKKYAVIDEEGKITTRGLEIVRRDWSEIAKETQARVLEALLKDGDVEKAVRIVKEVTEKLSKYEVPPEKLVIHEQITRDLKDYKATGPHVAVAKRLAARGVKIRPGTVISYIVLKGSGRIGDRAIPFDEFDPTKHKYDAEYYIENQVLPAVERILRAFGYRKEDLRYQKTRQVGLSAWLKPKGT

SEQ ID NO: 2635 - protein, 774 aa, synthetic construct
MILDTDLITEDGKPVIRIFKKENGEFKIEYDRTFEPYFYALLKDDSAIEEVKKITAERHGTVVTVKRVEKVQKKFLGRPVEVWKLYFTHWQDVPAIFDKIREHPAVIDIYEYDIPFAKRYLIDKGLVPMEGDEELKMLAFDIETLYHEGEEFAEGPILMISYADEEGARVITWKNVDLPYVDVVSTEREMIKRFLRVVKEKDPDVLITYNGDNFDFAYLKKRCEKLGINFALGRDGSEPKIQRMGDRFAVEVKGRIHFDLYPVIRRTINLPTYTLEAVYEAVFGQPKEKVYAEEITTAWETGENLERVARYSMEDAKVTYELGKEFLPMEAQLSRLIGQSLWDVSRSSTGNLVEWFLLRKAYERNELAPNKPDEKELARRRQSYEGGYVKEPERGLWENIVYLDFRSLYPSIIITHNVSPDTLNREGCKEYDVAPQVGHRFCKDFPGFIPSLLGDLLEERQKIKKKMKATIDPIERKLLDYRQRAIKILANSYYGYYGYARARWYCKECAESVTAWGREYITMTIKEIEEKYGFKVIYSDTDGFFATIPGADAETVKKKAMEFLKYINAKLPGALELEYEGFYKRGFFVTKKKYAVIDEEGKITTRGLEIVRRDWSEIAKETQARVLEALLKDGDVEKAVRIVKEVTEKLSKYEVPPEKLVIHEQITRDLKDYKATGPHVAVAKRLAARGVKIRPGTVISYIVLKGSGRIGDRAIPFDEFDPTKHKYDAEYYIENQVLPAVERILRAFGYRKEDLRYQKTRQVGLSAWLKPKGT

SEQ ID NO: 2636 - protein, 774 aa, synthetic construct
MILDTDLITEDGKPVIRIFKKENGEFKIEYDRTFEPYFYALLKDDSAIEEVKKITAERHGTVVTVKRVEKVQKKFLGRPVEVWKLYFTHWQDVPAIHDKIREHPAVIDIYEYDIPFAKRYLIDKGLVPMEGDEELKMLAFDIETLYHEGEEFAEGPILMISYADEEGARVITWKNVDLPYVDVVSTEREMIKRFLRVVKEKDPDVLITYNGDNFDFAYLKKRCEKLGINFALGRDGSEPKIQRMGDRFAVEVKGRIHFDLYPVIRRTINLPTYTLEAVYEAVFGQPKEKVYAEEITTAWETGENLERVARYSMEDAKVTYELGKEFLPMEAQLSRLIGQSLWDVSRSSTGNLVEWFLLRKAYERNELAPNKPDEKELARRRQSYEGGYVKEPERGLWENIVYLDFRSLYPSIIITHNVSPDTLNREGCKEYDVAPQVGHRFCKDFPGFIPSLLGDLLEERQKIKKKMKATIDPIERKLLDYRQRAIKILANSYYGYYGYARARWYCKECAESVTAWGREYITMTIKEIEEKYGFKVIYSDTDGFFATIPGADAETVKKKAMEFLKYINAKLPGALELEYEGFYKRGFFVTKKKYAVIDEEGKITTRGLEIVRRDWSEIAKETQARVLEALLKDGDVEKAVRIVKEVTEKLSKYEVPPEKLVIHEQITRDLKDYKATGPHVAVAKRLAARGVKIRPGTVISYIVLKGSGRIGDRAIPFDEFDPTKHKYDAEYYIENQVLPAVERILRAFGYRKEDLRYQKTRQVGLSAWLKPKGT

SEQ ID NO: 2637 - protein, 774 aa, synthetic construct
MILDTDLITEDGKPVIRIFKKENGEFKIEYDRTFEPYFYALLKDDSAIEEVKKITAERHGTVVTVKRVEKVQKKFLGRPVEVWKLYFTHWQDVPAIWDKIREHPAVIDIYEYDIPFAKRYLIDKGLVPMEGDEELKMLAFDIETLYHEGEEFAEGPILMISYADEEGARVITWKNVDLPYVDVVSTEREMIKRFLRVVKEKDPDVLITYNGDNFDFAYLKKRCEKLGINFALGRDGSEPKIQRMGDRFAVEVKGRIHFDLYPVIRRTINLPTYTLEAVYEAVFGQPKEKVYAEEITTAWETGENLERVARYSMEDAKVTYELGKEFLPMEAQLSRLIGQSLWDVSRSSTGNLVEWFLLRKAYERNELAPNKPDEKELARRRQSYEGGYVKEPERGLWENIVYLDFRSLYPSIIITHNVSPDTLNREGCKEYDVAPQVGHRFCKDFPGFIPSLLGDLLEERQKIKKKMKATIDPIERKLLDYRQRAIKILANSYYGYYGYARARWYCKECAESVTAWGREYITMTIKEIEEKYGFKVIYSDTDGFFATIPGADAETVKKKAMEFLKYINAKLPGALELEYEGFYKRGFFVTKKKYAVIDEEGKITTRGLEIVRRDWSEIAKETQARVLEALLKDGDVEKAVRIVKEVTEKLSKYEVPPEKLVIHEQITRDLKDYKATGPHVAVAKRLAARGVKIRPGTVISYIVLKGSGRIGDRAIPFDEFDPTKHKYDAEYYIENQVLPAVERILRAFGYRKEDLRYQKTRQVGLSAWLKPKGT

SEQ ID NO: 2638 - protein, 774 aa, synthetic construct
MILDTDLITEDGKPVIRIFKKENGEFKIEYDRTFEPYFYALLKDDSAIEEVKKITAERHGTVVTVKRVEKVQKKFLGRPVEVWKLYFTHWQDIPAIRDKIREHPAVIDIYEYDIPFAKRYLIDKGLVPMEGDEELKMLAFDIETLYHEGEEFAEGPILMISYADEEGARVITWKNVDLPYVDVVSTEREMIKRFLRVVKEKDPDVLITYNGDNFDFAYLKKRCEKLGINFALGRDGSEPKIQRMGDRFAVEVKGRIHFDLYPVIRRTINLPTYTLEAVYEAVFGQPKEKVYAEEITTAWETGENLERVARYSMEDAKVTYELGKEFLPMEAQLSRLIGQSLWDVSRSSTGNLVEWFLLRKAYERNELAPNKPDEKELARRRQSYEGGYVKEPERGLWENIVYLDFRSLYPSIIITHNVSPDTLNREGCKEYDVAPQVGHRFCKDFPGFIPSLLGDLLEERQKIKKKMKATIDPIERKLLDYRQRAIKILANSYYGYYGYARARWYCKECAESVTAWGREYITMTIKEIEEKYGFKVIYSDTDGFFATIPGADAETVKKKAMEFLKYINAKLPGALELEYEGFYKRGFFVTKKKYAVIDEEGKITTRGLEIVRRDWSEIAKETQARVLEALLKDGDVEKAVRIVKEVTEKLSKYEVPPEKLVIHEQITRDLKDYKATGPHVAVAKRLAARGVKIRPGTVISYIVLKGSGRIGDRAIPFDEFDPTKHKYDAEYYIENQVLPAVERILRAFGYRKEDLRYQKTRQVGLSAWLKPKGT

SEQ ID NO: 2639 - protein, 774 aa, synthetic construct
MILDTDLITEDGKPVIRIFKKENGEFKIEYDRTFEPYFYALLKDDSAIEEVKKITAERHGTVVTVKRVEKVQKKFLGRPVEVWKLYFTHWQDIPAIADKIREHPAVIDIYEYDIPFAKRYLIDKGLVPMEGDEELKMLAFDIETLYHEGEEFAEGPILMISYADEEGARVITWKNVDLPYVDVVSTEREMIKRFLRVVKEKDPDVLITYNGDNFDFAYLKKRCEKLGINFALGRDGSEPKIQRMGDRFAVEVKGRIHFDLYPVIRRTINLPTYTLEAVYEAVFGQPKEKVYAEEITTAWETGENLERVARYSMEDAKVTYELGKEFLPMEAQLSRLIGQSLWDVSRSSTGNLVEWFLLRKAYERNELAPNKPDEKELARRRQSYEGGYVKEPERGLWENIVYLDFRSLYPSIIITHNVSPDTLNREGCKEYDVAPQVGHRFCKDFPGFIPSLLGDLLEERQKIKKKMKATIDPIERKLLDYRQRAIKILANSYYGYYGYARARWYCKECAESVTAWGREYITMTIKEIEEKYGFKVIYSDTDGFFATIPGADAETVKKKAMEFLKYINAKLPGALELEYEGFYKRGFFVTKKKYAVIDEEGKITTRGLEIVRRDWSEIAKETQARVLEALLKDGDVEKAVRIVKEVTEKLSKYEVPPEKLVIHEQITRDLKDYKATGPHVAVAKRLAARGVKIRPGTVISYIVLKGSGRIGDRAIPFDEFDPTKHKYDAEYYIENQVLPAVERILRAFGYRKEDLRYQKTRQVGLSAWLKPKGT

SEQ ID NO: 2640 - protein, 774 aa, synthetic construct
MILDTDLITEDGKPVIRIFKKENGEFKIEYDRTFEPYFYALLKDDSAIEEVKKITAERHGTVVTVKRVEKVQKKFLGRPVEVWKLYFTHWQDIPAIFDKIREHPAVIDIYEYDIPFAKRYLIDKGLVPMEGDEELKMLAFDIETLYHEGEEFAEGPILMISYADEEGARVITWKNVDLPYVDVVSTEREMIKRFLRVVKEKDPDVLITYNGDNFDFAYLKKRCEKLGINFALGRDGSEPKIQRMGDRFAVEVKGRIHFDLYPVIRRTINLPTYTLEAVYEAVFGQPKEKVYAEEITTAWETGENLERVARYSMEDAKVTYELGKEFLPMEAQLSRLIGQSLWDVSRSSTGNLVEWFLLRKAYERNELAPNKPDEKELARRRQSYEGGYVKEPERGLWENIVYLDFRSLYPSIIITHNVSPDTLNREGCKEYDVAPQVGHRFCKDFPGFIPSLLGDLLEERQKIKKKMKATIDPIERKLLDYRQRAIKILANSYYGYYGYARARWYCKECAESVTAWGREYITMTIKEIEEKYGFKVIYSDTDGFFATIPGADAETVKKKAMEFLKYINAKLPGALELEYEGFYKRGFFVTKKKYAVIDEEGKITTRGLEIVRRDWSEIAKETQARVLEALLKDGDVEKAVRIVKEVTEKLSKYEVPPEKLVIHEQITRDLKDYKATGPHVAVAKRLAARGVKIRPGTVISYIVLKGSGRIGDRAIPFDEFDPTKHKYDAEYYIENQVLPAVERILRAFGYRKEDLRYQKTRQVGLSAWLKPKGT

SEQ ID NO: 2641 - protein, 774 aa, synthetic construct
MILDTDLITEDGKPVIRIFKKENGEFKIEYDRTFEPYFYALLKDDSAIEEVKKITAERHGTVVTVKRVEKVQKKFLGRPVEVWKLYFTHWQDIPAIHDKIREHPAVIDIYEYDIPFAKRYLIDKGLVPMEGDEELKMLAFDIETLYHEGEEFAEGPILMISYADEEGARVITWKNVDLPYVDVVSTEREMIKRFLRVVKEKDPDVLITYNGDNFDFAYLKKRCEKLGINFALGRDGSEPKIQRMGDRFAVEVKGRIHFDLYPVIRRTINLPTYTLEAVYEAVFGQPKEKVYAEEITTAWETGENLERVARYSMEDAKVTYELGKEFLPMEAQLSRLIGQSLWDVSRSSTGNLVEWFLLRKAYERNELAPNKPDEKELARRRQSYEGGYVKEPERGLWENIVYLDFRSLYPSIIITHNVSPDTLNREGCKEYDVAPQVGHRFCKDFPGFIPSLLGDLLEERQKIKKKMKATIDPIERKLLDYRQRAIKILANSYYGYYGYARARWYCKECAESVTAWGREYITMTIKEIEEKYGFKVIYSDTDGFFATIPGADAETVKKKAMEFLKYINAKLPGALELEYEGFYKRGFFVTKKKYAVIDEEGKITTRGLEIVRRDWSEIAKETQARVLEALLKDGDVEKAVRIVKEVTEKLSKYEVPPEKLVIHEQITRDLKDYKATGPHVAVAKRLAARGVKIRPGTVISYIVLKGSGRIGDRAIPFDEFDPTKHKYDAEYYIENQVLPAVERILRAFGYRKEDLRYQKTRQVGLSAWLKPKGT

SEQ ID NO: 2642 - protein, 774 aa, synthetic construct
MILDTDLITEDGKPVIRIFKKENGEFKIEYDRTFEPYFYALLKDDSAIEEVKKITAERHGTVVTVKRVEKVQKKFLGRPVEVWKLYFTHWQDIPAIWDKIREHPAVIDIYEYDIPFAKRYLIDKGLVPMEGDEELKMLAFDIETLYHEGEEFAEGPILMISYADEEGARVITWKNVDLPYVDVVSTEREMIKRFLRVVKEKDPDVLITYNGDNFDFAYLKKRCEKLGINFALGRDGSEPKIQRMGDRFAVEVKGRIHFDLYPVIRRTINLPTYTLEAVYEAVFGQPKEKVYAEEITTAWETGENLERVARYSMEDAKVTYELGKEFLPMEAQLSRLIGQSLWDVSRSSTGNLVEWFLLRKAYERNELAPNKPDEKELARRRQSYEGGYVKEPERGLWENIVYLDFRSLYPSIIITHNVSPDTLNREGCKEYDVAPQVGHRFCKDFPGFIPSLLGDLLEERQKIKKKMKATIDPIERKLLDYRQRAIKILANSYYGYYGYARARWYCKECAESVTAWGREYITMTIKEIEEKYGFKVIYSDTDGFFATIPGADAETVKKKAMEFLKYINAKLPGALELEYEGFYKRGFFVTKKKYAVIDEEGKITTRGLEIVRRDWSEIAKETQARVLEALLKDGDVEKAVRIVKEVTEKLSKYEVPPEKLVIHEQITRDLKDYKATGPHVAVAKRLAARGVKIRPGTVISYIVLKGSGRIGDRAIPFDEFDPTKHKYDAEYYIENQVLPAVERILRAFGYRKEDLRYQKTRQVGLSAWLKPKGT

SEQ ID NO: 2643 - protein, 774 aa, synthetic construct
MILDTDLITEDGKPVIRIFKKENGEFKIEYDRTFEPYFYALLKDDSAIEEVKKITAERHGTVVTVKRVEKVQKKFLGRPVEVWKLYFTHWQDQPAIRDKIREHPAVIDIYEYDIPFAKRYLIDKGLVPMEGDEELKMLAFDIETLYHEGEEFAEGPILMISYADEEGARVITWKNVDLPYVDVVSTEREMIKRFLRVVKEKDPDVLITYNGDNFDFAYLKKRCEKLGINFALGRDGSEPKIQRMGDRFAVEVKGRIHFDLYPVIRRTINLPTYTLEAVYEAVFGQPKEKVYAEEITTAWETGENLERVARYSMEDAKVTYELGKEFLPMEAQLSRLIGQSLWDVSRSSTGNLVEWFLLRKAYERNELAPNKPDEKELARRRQSYEGGYVKEPERGLWENIVYLDFRSLYPSIIITHNVSPDTLNREGCKEYDVAPQVGHRFCKDFPGFIPSLLGDLLEERQKIKKKMKATIDPIERKLLDYRQRAIKILANSYYGYYGYARARWYCKECAESVTAWGREYITMTIKEIEEKYGFKVIYSDTDGFFATIPGADAETVKKKAMEFLKYINAKLPGALELEYEGFYKRGFFVTKKKYAVIDEEGKITTRGLEIVRRDWSEIAKETQARVLEALLKDGDVEKAVRIVKEVTEKLSKYEVPPEKLVIHEQITRDLKDYKATGPHVAVAKRLAARGVKIRPGTVISYIVLKGSGRIGDRAIPFDEFDPTKHKYDAEYYIENQVLPAVERILRAFGYRKEDLRYQKTRQVGLSAWLKPKGT

SEQ ID NO: 2644 - protein, 774 aa, synthetic construct
MILDTDLITEDGKPVIRIFKKENGEFKIEYDRTFEPYFYALLKDDSAIEEVKKITAERHGTVVTVKRVEKVQKKFLGRPVEVWKLYFTHWQDRPAIRDKIREHPAVIDIYEYDIPFAKRYLIDKGLVPMEGDEELKMLAFDIETLYHEGEEFAEGPILMISYADEEGARVITWKNVDLPYVDVVSTEREMIKRFLRVVKEKDPDVLITYNGDNFDFAYLKKRCEKLGINFALGRDGSEPKIQRMGDRFAVEVKGRIHFDLYPVIRRTINLPTYTLEAVYEAVFGQPKEKVYAEEITTAWETGENLERVARYSMEDAKVTYELGKEFLPMEAQLSRLIGQSLWDVSRSSTGNLVEWFLLRKAYERNELAPNKPDEKELARRRQSYEGGYVKEPERGLWENIVYLDFRSLYPSIIITHNVSPDTLNREGCKEYDVAPQVGHRFCKDFPGFIPSLLGDLLEERQKIKKKMKATIDPIERKLLDYRQRAIKILANSYYGYYGYARARWYCKECAESVTAWGREYITMTIKEIEEKYGFKVIYSDTDGFFATIPGADAETVKKKAMEFLKYINAKLPGALELEYEGFYKRGFFVTKKKYAVIDEEGKITTRGLEIVRRDWSEIAKETQARVLEALLKDGDVEKAVRIVKEVTEKLSKYEVPPEKLVIHEQITRDLKDYKATGPHVAVAKRLAARGVKIRPGTVISYIVLKGSGRIGDRAIPFDEFDPTKHKYDAEYYIENQVLPAVERILRAFGYRKEDLRYQKTRQVGLSAWLKPKGT

SEQ ID NO: 2645 - protein, 774 aa, synthetic construct
MILDTDLITEDGKPVIRIFKKENGEFKIEYDRTFEPYFYALLKDDSAIEEVKKITAERHGTVVTVKRVEKVQKKFLGRPVEVWKLYFTHYQDVPAIRDKIREHPAVIDIYEYDIPFAKRYLIDKGLVPMEGDEELKMLAFDIETLYHEGEEFAEGPILMISYADEEGARVITWKNVDLPYVDVVSTEREMIKRFLRVVKEKDPDVLITYNGDNFDFAYLKKRCEKLGINFALGRDGSEPKIQRMGDRFAVEVKGRIHFDLYPVIRRTINLPTYTLEAVYEAVFGQPKEKVYAEEITTAWETGENLERVARYSMEDAKVTYELGKEFLPMEAQLSRLIGQSLWDVSRSSTGNLVEWFLLRKAYERNELAPNKPDEKELARRRQSYEGGYVKEPERGLWENIVYLDFRSLYPSIIITHNVSPDTLNREGCKEYDVAPQVGHRFCKDFPGFIPSLLGDLLEERQKIKKKMKATIDPIERKLLDYRQRAIKILANSYYGYYGYARARWYCKECAESVTAWGREYITMTIKEIEEKYGFKVIYSDTDGFFATIPGADAETVKKKAMEFLKYINAKLPGALELEYEGFYKRGFFVTKKKYAVIDEEGKITTRGLEIVRRDWSEIAKETQARVLEALLKDGDVEKAVRIVKEVTEKLSKYEVPPEKLVIHEQITRDLKDYKATGPHVAVAKRLAARGVKIRPGTVISYIVLKGSGRIGDRAIPFDEFDPTKHKYDAEYYIENQVLPAVERILRAFGYRKEDLRYQKTRQVGLSAWLKPKGT

SEQ ID NO: 2646 - protein, 774 aa, synthetic construct
MILDTDLITEDGKPVIRIFKKENGEFKIEYDRTFEPYFYALLKDDSAIEEVKKITAERHGTVVTVKRVEKVQKKFLGRPVEVWKLYFTHYQDVPAIFDKIREHPAVIDIYEYDIPFAKRYLIDKGLVPMEGDEELKMLAFDIETLYHEGEEFAEGPILMISYADEEGARVITWKNVDLPYVDVVSTEREMIKRFLRVVKEKDPDVLITYNGDNFDFAYLKKRCEKLGINFALGRDGSEPKIQRMGDRFAVEVKGRIHFDLYPVIRRTINLPTYTLEAVYEAVFGQPKEKVYAEEITTAWETGENLERVARYSMEDAKVTYELGKEFLPMEAQLSRLIGQSLWDVSRSSTGNLVEWFLLRKAYERNELAPNKPDEKELARRRQSYEGGYVKEPERGLWENIVYLDFRSLYPSIIITHNVSPDTLNREGCKEYDVAPQVGHRFCKDFPGFIPSLLGDLLEERQKIKKKMKATIDPIERKLLDYRQRAIKILANSYYGYYGYARARWYCKECAESVTAWGREYITMTIKEIEEKYGFKVIYSDTDGFFATIPGADAETVKKKAMEFLKYINAKLPGALELEYEGFYKRGFFVTKKKYAVIDEEGKITTRGLEIVRRDWSEIAKETQARVLEALLKDGDVEKAVRIVKEVTEKLSKYEVPPEKLVIHEQITRDLKDYKATGPHVAVAKRLAARGVKIRPGTVISYIVLKGSGRIGDRAIPFDEFDPTKHKYDAEYYIENQVLPAVERILRAFGYRKEDLRYQKTRQVGLSAWLKPKGT

SEQ ID NO: 2647 - protein, 774 aa, synthetic construct
MILDTDLITEDGKPVIRIFKKENGEFKIEYDRTFEPYFYALLKDDSAIEEVKKITAERHGTVVTVKRVEKVQKKFLGRPVEVWKLYFTHYQDVPAIHDKIREHPAVIDIYEYDIPFAKRYLIDKGLVPMEGDEELKMLAFDIETLYHEGEEFAEGPILMISYADEEGARVITWKNVDLPYVDVVSTEREMIKRFLRVVKEKDPDVLITYNGDNFDFAYLKKRCEKLGINFALGRDGSEPKIQRMGDRFAVEVKGRIHFDLYPVIRRTINLPTYTLEAVYEAVFGQPKEKVYAEEITTAWETGENLERVARYSMEDAKVTYELGKEFLPMEAQLSRLIGQSLWDVSRSSTGNLVEWFLLRKAYERNELAPNKPDEKELARRRQSYEGGYVKEPERGLWENIVYLDFRSLYPSIIITHNVSPDTLNREGCKEYDVAPQVGHRFCKDFPGFIPSLLGDLLEERQKIKKKMKATIDPIERKLLDYRQRAIKILANSYYGYYGYARARWYCKECAESVTAWGREYITMTIKEIEEKYGFKVIYSDTDGFFATIPGADAETVKKKAMEFLKYINAKLPGALELEYEGFYKRGFFVTKKKYAVIDEEGKITTRGLEIVRRDWSEIAKETQARVLEALLKDGDVEKAVRIVKEVTEKLSKYEVPPEKLVIHEQITRDLKDYKATGPHVAVAKRLAARGVKIRPGTVISYIVLKGSGRIGDRAIPFDEFDPTKHKYDAEYYIENQVLPAVERILRAFGYRKEDLRYQKTRQVGLSAWLKPKGT

SEQ ID NO: 2648 - protein, 774 aa, synthetic construct
MILDTDLITEDGKPVIRIFKKENGEFKIEYDRTFEPYFYALLKDDSAIEEVKKITAERHGTVVTVKRVEKVQKKFLGRPVEVWKLYFTHYQDVPAIWDKIREHPAVIDIYEYDIPFAKRYLIDKGLVPMEGDEELKMLAFDIETLYHEGEEFAEGPILMISYADEEGARVITWKNVDLPYVDVVSTEREMIKRFLRVVKEKDPDVLITYNGDNFDFAYLKKRCEKLGINFALGRDGSEPKIQRMGDRFAVEVKGRIHFDLYPVIRRTINLPTYTLEAVYEAVFGQPKEKVYAEEITTAWETGENLERVARYSMEDAKVTYELGKEFLPMEAQLSRLIGQSLWDVSRSSTGNLVEWFLLRKAYERNELAPNKPDEKELARRRQSYEGGYVKEPERGLWENIVYLDFRSLYPSIIITHNVSPDTLNREGCKEYDVAPQVGHRFCKDFPGFIPSLLGDLLEERQKIKKKMKATIDPIERKLLDYRQRAIKILANSYYGYYGYARARWYCKECAESVTAWGREYITMTIKEIEEKYGFKVIYSDTDGFFATIPGADAETVKKKAMEFLKYINAKLPGALELEYEGFYKRGFFVTKKKYAVIDEEGKITTRGLEIVRRDWSEIAKETQARVLEALLKDGDVEKAVRIVKEVTEKLSKYEVPPEKLVIHEQITRDLKDYKATGPHVAVAKRLAARGVKIRPGTVISYIVLKGSGRIGDRAIPFDEFDPTKHKYDAEYYIENQVLPAVERILRAFGYRKEDLRYQKTRQVGLSAWLKPKGT

SEQ ID NO: 2649 - protein, 774 aa, synthetic construct
MILDTDLITEDGKPVIRIFKKENGEFKIEYDRTFEPYFYALLKDDSAIEEVKKITAERHGTVVTVKRVEKVQKKFLGRPVEVWKLYFTHYQDIPAIRDKIREHPAVIDIYEYDIPFAKRYLIDKGLVPMEGDEELKMLAFDIETLYHEGEEFAEGPILMISYADEEGARVITWKNVDLPYVDVVSTEREMIKRFLRVVKEKDPDVLITYNGDNFDFAYLKKRCEKLGINFALGRDGSEPKIQRMGDRFAVEVKGRIHFDLYPVIRRTINLPTYTLEAVYEAVFGQPKEKVYAEEITTAWETGENLERVARYSMEDAKVTYELGKEFLPMEAQLSRLIGQSLWDVSRSSTGNLVEWFLLRKAYERNELAPNKPDEKELARRRQSYEGGYVKEPERGLWENIVYLDFRSLYPSIIITHNVSPDTLNREGCKEYDVAPQVGHRFCKDFPGFIPSLLGDLLEERQKIKKKMKATIDPIERKLLDYRQRAIKILANSYYGYYGYARARWYCKECAESVTAWGREYITMTIKEIEEKYGFKVIYSDTDGFFATIPGADAETVKKKAMEFLKYINAKLPGALELEYEGFYKRGFFVTKKKYAVIDEEGKITTRGLEIVRRDWSEIAKETQARVLEALLKDGDVEKAVRIVKEVTEKLSKYEVPPEKLVIHEQITRDLKDYKATGPHVAVAKRLAARGVKIRPGTVISYIVLKGSGRIGDRAIPFDEFDPTKHKYDAEYYIENQVLPAVERILRAFGYRKEDLRYQKTRQVGLSAWLKPKGT

SEQ ID NO: 2650 - protein, 774 aa, synthetic construct
MILDTDLITEDGKPVIRIFKKENGEFKIEYDRTFEPYFYALLKDDSAIEEVKKITAERHGTVVTVKRVEKVQKKFLGRPVEVWKLYFTHYQDIPAIADKIREHPAVIDIYEYDIPFAKRYLIDKGLVPMEGDEELKMLAFDIETLYHEGEEFAEGPILMISYADEEGARVITWKNVDLPYVDVVSTEREMIKRFLRVVKEKDPDVLITYNGDNFDFAYLKKRCEKLGINFALGRDGSEPKIQRMGDRFAVEVKGRIHFDLYPVIRRTINLPTYTLEAVYEAVFGQPKEKVYAEEITTAWETGENLERVARYSMEDAKVTYELGKEFLPMEAQLSRLIGQSLWDVSRSSTGNLVEWFLLRKAYERNELAPNKPDEKELARRRQSYEGGYVKEPERGLWENIVYLDFRSLYPSIIITHNVSPDTLNREGCKEYDVAPQVGHRFCKDFPGFIPSLLGDLLEERQKIKKKMKATIDPIERKLLDYRQRAIKILANSYYGYYGYARARWYCKECAESVTAWGREYITMTIKEIEEKYGFKVIYSDTDGFFATIPGADAETVKKKAMEFLKYINAKLPGALELEYEGFYKRGFFVTKKKYAVIDEEGKITTRGLEIVRRDWSEIAKETQARVLEALLKDGDVEKAVRIVKEVTEKLSKYEVPPEKLVIHEQITRDLKDYKATGPHVAVAKRLAARGVKIRPGTVISYIVLKGSGRIGDRAIPFDEFDPTKHKYDAEYYIENQVLPAVERILRAFGYRKEDLRYQKTRQVGLSAWLKPKGT

SEQ ID NO: 2651 - protein, 774 aa, synthetic construct
MILDTDLITEDGKPVIRIFKKENGEFKIEYDRTFEPYFYALLKDDSAIEEVKKITAERHGTVVTVKRVEKVQKKFLGRPVEVWKLYFTHYQDIPAIFDKIREHPAVIDIYEYDIPFAKRYLIDKGLVPMEGDEELKMLAFDIETLYHEGEEFAEGPILMISYADEEGARVITWKNVDLPYVDVVSTEREMIKRFLRVVKEKDPDVLITYNGDNFDFAYLKKRCEKLGINFALGRDGSEPKIQRMGDRFAVEVKGRIHFDLYPVIRRTINLPTYTLEAVYEAVFGQPKEKVYAEEITTAWETGENLERVARYSMEDAKVTYELGKEFLPMEAQLSRLIGQSLWDVSRSSTGNLVEWFLLRKAYERNELAPNKPDEKELARRRQSYEGGYVKEPERGLWENIVYLDFRSLYPSIIITHNVSPDTLNREGCKEYDVAPQVGHRFCKDFPGFIPSLLGDLLEERQKIKKKMKATIDPIERKLLDYRQRAIKILANSYYGYYGYARARWYCKECAESVTAWGREYITMTIKEIEEKYGFKVIYSDTDGFFATIPGADAETVKKKAMEFLKYINAKLPGALELEYEGFYKRGFFVTKKKYAVIDEEGKITTRGLEIVRRDWSEIAKETQARVLEALLKDGDVEKAVRIVKEVTEKLSKYEVPPEKLVIHEQITRDLKDYKATGPHVAVAKRLAARGVKIRPGTVISYIVLKGSGRIGDRAIPFDEFDPTKHKYDAEYYIENQVLPAVERILRAFGYRKEDLRYQKTRQVGLSAWLKPKGT

SEQ ID NO: 2652 - protein, 774 aa, synthetic construct
MILDTDLITEDGKPVIRIFKKENGEFKIEYDRTFEPYFYALLKDDSAIEEVKKITAERHGTVVTVKRVEKVQKKFLGRPVEVWKLYFTHYQDIPAIHDKIREHPAVIDIYEYDIPFAKRYLIDKGLVPMEGDEELKMLAFDIETLYHEGEEFAEGPILMISYADEEGARVITWKNVDLPYVDVVSTEREMIKRFLRVVKEKDPDVLITYNGDNFDFAYLKKRCEKLGINFALGRDGSEPKIQRMGDRFAVEVKGRIHFDLYPVIRRTINLPTYTLEAVYEAVFGQPKEKVYAEEITTAWETGENLERVARYSMEDAKVTYELGKEFLPMEAQLSRLIGQSLWDVSRSSTGNLVEWFLLRKAYERNELAPNKPDEKELARRRQSYEGGYVKEPERGLWENIVYLDFRSLYPSIIITHNVSPDTLNREGCKEYDVAPQVGHRFCKDFPGFIPSLLGDLLEERQKIKKKMKATIDPIERKLLDYRQRAIKILANSYYGYYGYARARWYCKECAESVTAWGREYITMTIKEIEEKYGFKVIYSDTDGFFATIPGADAETVKKKAMEFLKYINAKLPGALELEYEGFYKRGFFVTKKKYAVIDEEGKITTRGLEIVRRDWSEIAKETQARVLEALLKDGDVEKAVRIVKEVTEKLSKYEVPPEKLVIHEQITRDLKDYKATGPHVAVAKRLAARGVKIRPGTVISYIVLKGSGRIGDRAIPFDEFDPTKHKYDAEYYIENQVLPAVERILRAFGYRKEDLRYQKTRQVGLSAWLKPKGT

SEQ ID NO: 2653 - protein, 774 aa, synthetic construct
MILDTDLITEDGKPVIRIFKKENGEFKIEYDRTFEPYFYALLKDDSAIEEVKKITAERHGTVVTVKRVEKVQKKFLGRPVEVWKLYFTHYQDRPAIADKIREHPAVIDIYEYDIPFAKRYLIDKGLVPMEGDEELKMLAFDIETLYHEGEEFAEGPILMISYADEEGARVITWKNVDLPYVDVVSTEREMIKRFLRVVKEKDPDVLITYNGDNFDFAYLKKRCEKLGINFALGRDGSEPKIQRMGDRFAVEVKGRIHFDLYPVIRRTINLPTYTLEAVYEAVFGQPKEKVYAEEITTAWETGENLERVARYSMEDAKVTYELGKEFLPMEAQLSRLIGQSLWDVSRSSTGNLVEWFLLRKAYERNELAPNKPDEKELARRRQSYEGGYVKEPERGLWENIVYLDFRSLYPSIIITHNVSPDTLNREGCKEYDVAPQVGHRFCKDFPGFIPSLLGDLLEERQKIKKKMKATIDPIERKLLDYRQRAIKILANSYYGYYGYARARWYCKECAESVTAWGREYITMTIKEIEEKYGFKVIYSDTDGFFATIPGADAETVKKKAMEFLKYINAKLPGALELEYEGFYKRGFFVTKKKYAVIDEEGKITTRGLEIVRRDWSEIAKETQARVLEALLKDGDVEKAVRIVKEVTEKLSKYEVPPEKLVIHEQITRDLKDYKATGPHVAVAKRLAARGVKIRPGTVISYIVLKGSGRIGDRAIPFDEFDPTKHKYDAEYYIENQVLPAVERILRAFGYRKEDLRYQKTRQVGLSAWLKPKGT

SEQ ID NO: 2654 - protein, 774 aa, synthetic construct
MILDTDLITEDGKPVIRIFKKENGEFKIEYDRTFEPYFYALLKDDSAIEEVKKITAERHGTVVTVKRVEKVQKKFLGRPVEVWKLYFTHPQDVPAIFDKIREHPAVIDIYEYDIPFAKRYLIDKGLVPMEGDEELKMLAFDIETLYHEGEEFAEGPILMISYADEEGARVITWKNVDLPYVDVVSTEREMIKRFLRVVKEKDPDVLITYNGDNFDFAYLKKRCEKLGINFALGRDGSEPKIQRMGDRFAVEVKGRIHFDLYPVIRRTINLPTYTLEAVYEAVFGQPKEKVYAEEITTAWETGENLERVARYSMEDAKVTYELGKEFLPMEAQLSRLIGQSLWDVSRSSTGNLVEWFLLRKAYERNELAPNKPDEKELARRRQSYEGGYVKEPERGLWENIVYLDFRSLYPSIIITHNVSPDTLNREGCKEYDVAPQVGHRFCKDFPGFIPSLLGDLLEERQKIKKKMKATIDPIERKLLDYRQRAIKILANSYYGYYGYARARWYCKECAESVTAWGREYITMTIKEIEEKYGFKVIYSDTDGFFATIPGADAETVKKKAMEFLKYINAKLPGALELEYEGFYKRGFFVTKKKYAVIDEEGKITTRGLEIVRRDWSEIAKETQARVLEALLKDGDVEKAVRIVKEVTEKLSKYEVPPEKLVIHEQITRDLKDYKATGPHVAVAKRLAARGVKIRPGTVISYIVLKGSGRIGDRAIPFDEFDPTKHKYDAEYYIENQVLPAVERILRAFGYRKEDLRYQKTRQVGLSAWLKPKGT

SEQ ID NO: 2655 - protein, 774 aa, synthetic construct
MILDTDLITEDGKPVIRIFKKENGEFKIEYDRTFEPYFYALLKDDSAIEEVKKITAERHGTVVTVKRVEKVQKKFLGRPVEVWKLYFTHPQDVPAIHDKIREHPAVIDIYEYDIPFAKRYLIDKGLVPMEGDEELKMLAFDIETLYHEGEEFAEGPILMISYADEEGARVITWKNVDLPYVDVVSTEREMIKRFLRVVKEKDPDVLITYNGDNFDFAYLKKRCEKLGINFALGRDGSEPKIQRMGDRFAVEVKGRIHFDLYPVIRRTINLPTYTLEAVYEAVFGQPKEKVYAEEITTAWETGENLERVARYSMEDAKVTYELGKEFLPMEAQLSRLIGQSLWDVSRSSTGNLVEWFLLRKAYERNELAPNKPDEKELARRRQSYEGGYVKEPERGLWENIVYLDFRSLYPSIIITHNVSPDTLNREGCKEYDVAPQVGHRFCKDFPGFIPSLLGDLLEERQKIKKKMKATIDPIERKLLDYRQRAIKILANSYYGYYGYARARWYCKECAESVTAWGREYITMTIKEIEEKYGFKVIYSDTDGFFATIPGADAETVKKKAMEFLKYINAKLPGALELEYEGFYKRGFFVTKKKYAVIDEEGKITTRGLEIVRRDWSEIAKETQARVLEALLKDGDVEKAVRIVKEVTEKLSKYEVPPEKLVIHEQITRDLKDYKATGPHVAVAKRLAARGVKIRPGTVISYIVLKGSGRIGDRAIPFDEFDPTKHKYDAEYYIENQVLPAVERILRAFGYRKEDLRYQKTRQVGLSAWLKPKGT

SEQ ID NO: 2656 - protein, 774 aa, synthetic construct
MILDTDLITEDGKPVIRIFKKENGEFKIEYDRTFEPYFYALLKDDSAIEEVKKITAERHGTVVTVKRVEKVQKKFLGRPVEVWKLYFTHPQDVPAIWDKIREHPAVIDIYEYDIPFAKRYLIDKGLVPMEGDEELKMLAFDIETLYHEGEEFAEGPILMISYADEEGARVITWKNVDLPYVDVVSTEREMIKRFLRVVKEKDPDVLITYNGDNFDFAYLKKRCEKLGINFALGRDGSEPKIQRMGDRFAVEVKGRIHFDLYPVIRRTINLPTYTLEAVYEAVFGQPKEKVYAEEITTAWETGENLERVARYSMEDAKVTYELGKEFLPMEAQLSRLIGQSLWDVSRSSTGNLVEWFLLRKAYERNELAPNKPDEKELARRRQSYEGGYVKEPERGLWENIVYLDFRSLYPSIIITHNVSPDTLNREGCKEYDVAPQVGHRFCKDFPGFIPSLLGDLLEERQKIKKKMKATIDPIERKLLDYRQRAIKILANSYYGYYGYARARWYCKECAESVTAWGREYITMTIKEIEEKYGFKVIYSDTDGFFATIPGADAETVKKKAMEFLKYINAKLPGALELEYEGFYKRGFFVTKKKYAVIDEEGKITTRGLEIVRRDWSEIAKETQARVLEALLKDGDVEKAVRIVKEVTEKLSKYEVPPEKLVIHEQITRDLKDYKATGPHVAVAKRLAARGVKIRPGTVISYIVLKGSGRIGDRAIPFDEFDPTKHKYDAEYYIENQVLPAVERILRAFGYRKEDLRYQKTRQVGLSAWLKPKGT

SEQ ID NO: 2657 - protein, 774 aa, synthetic construct
MILDTDLITEDGKPVIRIFKKENGEFKIEYDRTFEPYFYALLKDDSAIEEVKKITAERHGTVVTVKRVEKVQKKFLGRPVEVWKLYFTHPQDIPAIRDKIREHPAVIDIYEYDIPFAKRYLIDKGLVPMEGDEELKMLAFDIETLYHEGEEFAEGPILMISYADEEGARVITWKNVDLPYVDVVSTEREMIKRFLRVVKEKDPDVLITYNGDNFDFAYLKKRCEKLGINFALGRDGSEPKIQRMGDRFAVEVKGRIHFDLYPVIRRTINLPTYTLEAVYEAVFGQPKEKVYAEEITTAWETGENLERVARYSMEDAKVTYELGKEFLPMEAQLSRLIGQSLWDVSRSSTGNLVEWFLLRKAYERNELAPNKPDEKELARRRQSYEGGYVKEPERGLWENIVYLDFRSLYPSIIITHNVSPDTLNREGCKEYDVAPQVGHRFCKDFPGFIPSLLGDLLEERQKIKKKMKATIDPIERKLLDYRQRAIKILANSYYGYYGYARARWYCKECAESVTAWGREYITMTIKEIEEKYGFKVIYSDTDGFFATIPGADAETVKKKAMEFLKYINAKLPGALELEYEGFYKRGFFVTKKKYAVIDEEGKITTRGLEIVRRDWSEIAKETQARVLEALLKDGDVEKAVRIVKEVTEKLSKYEVPPEKLVIHEQITRDLKDYKATGPHVAVAKRLAARGVKIRPGTVISYIVLKGSGRIGDRAIPFDEFDPTKHKYDAEYYIENQVLPAVERILRAFGYRKEDLRYQKTRQVGLSAWLKPKGT

SEQ ID NO: 2658 - protein, 774 aa, synthetic construct
MILDTDLITEDGKPVIRIFKKENGEFKIEYDRTFEPYFYALLKDDSAIEEVKKITAERHGTVVTVKRVEKVQKKFLGRPVEVWKLYFTHPQDIPAIFDKIREHPAVIDIYEYDIPFAKRYLIDKGLVPMEGDEELKMLAFDIETLYHEGEEFAEGPILMISYADEEGARVITWKNVDLPYVDVVSTEREMIKRFLRVVKEKDPDVLITYNGDNFDFAYLKKRCEKLGINFALGRDGSEPKIQRMGDRFAVEVKGRIHFDLYPVIRRTINLPTYTLEAVYEAVFGQPKEKVYAEEITTAWETGENLERVARYSMEDAKVTYELGKEFLPMEAQLSRLIGQSLWDVSRSSTGNLVEWFLLRKAYERNELAPNKPDEKELARRRQSYEGGYVKEPERGLWENIVYLDFRSLYPSIIITHNVSPDTLNREGCKEYDVAPQVGHRFCKDFPGFIPSLLGDLLEERQKIKKKMKATIDPIERKLLDYRQRAIKILANSYYGYYGYARARWYCKECAESVTAWGREYITMTIKEIEEKYGFKVIYSDTDGFFATIPGADAETVKKKAMEFLKYINAKLPGALELEYEGFYKRGFFVTKKKYAVIDEEGKITTRGLEIVRRDWSEIAKETQARVLEALLKDGDVEKAVRIVKEVTEKLSKYEVPPEKLVIHEQITRDLKDYKATGPHVAVAKRLAARGVKIRPGTVISYIVLKGSGRIGDRAIPFDEFDPTKHKYDAEYYIENQVLPAVERILRAFGYRKEDLRYQKTRQVGLSAWLKPKGT

SEQ ID NO: 2659 - protein, 774 aa, synthetic construct
MILDTDLITEDGKPVIRIFKKENGEFKIEYDRTFEPYFYALLKDDSAIEEVKKITAERHGTVVTVKRVEKVQKKFLGRPVEVWKLYFTHPQDIPAIHDKIREHPAVIDIYEYDIPFAKRYLIDKGLVPMEGDEELKMLAFDIETLYHEGEEFAEGPILMISYADEEGARVITWKNVDLPYVDVVSTEREMIKRFLRVVKEKDPDVLITYNGDNFDFAYLKKRCEKLGINFALGRDGSEPKIQRMGDRFAVEVKGRIHFDLYPVIRRTINLPTYTLEAVYEAVFGQPKEKVYAEEITTAWETGENLERVARYSMEDAKVTYELGKEFLPMEAQLSRLIGQSLWDVSRSSTGNLVEWFLLRKAYERNELAPNKPDEKELARRRQSYEGGYVKEPERGLWENIVYLDFRSLYPSIIITHNVSPDTLNREGCKEYDVAPQVGHRFCKDFPGFIPSLLGDLLEERQKIKKKMKATIDPIERKLLDYRQRAIKILANSYYGYYGYARARWYCKECAESVTAWGREYITMTIKEIEEKYGFKVIYSDTDGFFATIPGADAETVKKKAMEFLKYINAKLPGALELEYEGFYKRGFFVTKKKYAVIDEEGKITTRGLEIVRRDWSEIAKETQARVLEALLKDGDVEKAVRIVKEVTEKLSKYEVPPEKLVIHEQITRDLKDYKATGPHVAVAKRLAARGVKIRPGTVISYIVLKGSGRIGDRAIPFDEFDPTKHKYDAEYYIENQVLPAVERILRAFGYRKEDLRYQKTRQVGLSAWLKPKGT

SEQ ID NO: 2660 - protein, 774 aa, synthetic construct
MILDTDLITEDGKPVIRIFKKENGEFKIEYDRTFEPYFYALLKDDSAIEEVKKITAERHGTVVTVKRVEKVQKKFLGRPVEVWKLYFTHPQDIPAIWDKIREHPAVIDIYEYDIPFAKRYLIDKGLVPMEGDEELKMLAFDIETLYHEGEEFAEGPILMISYADEEGARVITWKNVDLPYVDVVSTEREMIKRFLRVVKEKDPDVLITYNGDNFDFAYLKKRCEKLGINFALGRDGSEPKIQRMGDRFAVEVKGRIHFDLYPVIRRTINLPTYTLEAVYEAVFGQPKEKVYAEEITTAWETGENLERVARYSMEDAKVTYELGKEFLPMEAQLSRLIGQSLWDVSRSSTGNLVEWFLLRKAYERNELAPNKPDEKELARRRQSYEGGYVKEPERGLWENIVYLDFRSLYPSIIITHNVSPDTLNREGCKEYDVAPQVGHRFCKDFPGFIPSLLGDLLEERQKIKKKMKATIDPIERKLLDYRQRAIKILANSYYGYYGYARARWYCKECAESVTAWGREYITMTIKEIEEKYGFKVIYSDTDGFFATIPGADAETVKKKAMEFLKYINAKLPGALELEYEGFYKRGFFVTKKKYAVIDEEGKITTRGLEIVRRDWSEIAKETQARVLEALLKDGDVEKAVRIVKEVTEKLSKYEVPPEKLVIHEQITRDLKDYKATGPHVAVAKRLAARGVKIRPGTVISYIVLKGSGRIGDRAIPFDEFDPTKHKYDAEYYIENQVLPAVERILRAFGYRKEDLRYQKTRQVGLSAWLKPKGT

SEQ ID NO: 2661 - protein, 774 aa, synthetic construct
MILDTDLITEDGKPVIRIFKKENGEFKIEYDRTFEPYFYALLKDDSAIEEVKKITAERHGTVVTVKRVEKVQKKFLGRPVEVWKLYFTHPQDKPAIRDKIREHPAVIDIYEYDIPFAKRYLIDKGLVPMEGDEELKMLAFDIETLYHEGEEFAEGPILMISYADEEGARVITWKNVDLPYVDVVSTEREMIKRFLRVVKEKDPDVLITYNGDNFDFAYLKKRCEKLGINFALGRDGSEPKIQRMGDRFAVEVKGRIHFDLYPVIRRTINLPTYTLEAVYEAVFGQPKEKVYAEEITTAWETGENLERVARYSMEDAKVTYELGKEFLPMEAQLSRLIGQSLWDVSRSSTGNLVEWFLLRKAYERNELAPNKPDEKELARRRQSYEGGYVKEPERGLWENIVYLDFRSLYPSIIITHNVSPDTLNREGCKEYDVAPQVGHRFCKDFPGFIPSLLGDLLEERQKIKKKMKATIDPIERKLLDYRQRAIKILANSYYGYYGYARARWYCKECAESVTAWGREYITMTIKEIEEKYGFKVIYSDTDGFFATIPGADAETVKKKAMEFLKYINAKLPGALELEYEGFYKRGFFVTKKKYAVIDEEGKITTRGLEIVRRDWSEIAKETQARVLEALLKDGDVEKAVRIVKEVTEKLSKYEVPPEKLVIHEQITRDLKDYKATGPHVAVAKRLAARGVKIRPGTVISYIVLKGSGRIGDRAIPFDEFDPTKHKYDAEYYIENQVLPAVERILRAFGYRKEDLRYQKTRQVGLSAWLKPKGT

SEQ ID NO: 2662 - protein, 774 aa, synthetic construct
MILDTDLITEDGKPVIRIFKKENGEFKIEYDRTFEPYFYALLKDDSAIEEVKKITAERHGTVVTVKRVEKVQKKFLGRPVEVWKLYFTHPQDKPAIHDKIREHPAVIDIYEYDIPFAKRYLIDKGLVPMEGDEELKMLAFDIETLYHEGEEFAEGPILMISYADEEGARVITWKNVDLPYVDVVSTEREMIKRFLRVVKEKDPDVLITYNGDNFDFAYLKKRCEKLGINFALGRDGSEPKIQRMGDRFAVEVKGRIHFDLYPVIRRTINLPTYTLEAVYEAVFGQPKEKVYAEEITTAWETGENLERVARYSMEDAKVTYELGKEFLPMEAQLSRLIGQSLWDVSRSSTGNLVEWFLLRKAYERNELAPNKPDEKELARRRQSYEGGYVKEPERGLWENIVYLDFRSLYPSIIITHNVSPDTLNREGCKEYDVAPQVGHRFCKDFPGFIPSLLGDLLEERQKIKKKMKATIDPIERKLLDYRQRAIKILANSYYGYYGYARARWYCKECAESVTAWGREYITMTIKEIEEKYGFKVIYSDTDGFFATIPGADAETVKKKAMEFLKYINAKLPGALELEYEGFYKRGFFVTKKKYAVIDEEGKITTRGLEIVRRDWSEIAKETQARVLEALLKDGDVEKAVRIVKEVTEKLSKYEVPPEKLVIHEQITRDLKDYKATGPHVAVAKRLAARGVKIRPGTVISYIVLKGSGRIGDRAIPFDEFDPTKHKYDAEYYIENQVLPAVERILRAFGYRKEDLRYQKTRQVGLSAWLKPKGT

SEQ ID NO: 2663 - protein, 774 aa, synthetic construct
MILDTDLITEDGKPVIRIFKKENGEFKIEYDRTFEPYFYALLKDDSAIEEVKKITAERHGTVVTVKRVEKVQKKFLGRPVEVWKLYFTHPQDQPAIRDKIREHPAVIDIYEYDIPFAKRYLIDKGLVPMEGDEELKMLAFDIETLYHEGEEFAEGPILMISYADEEGARVITWKNVDLPYVDVVSTEREMIKRFLRVVKEKDPDVLITYNGDNFDFAYLKKRCEKLGINFALGRDGSEPKIQRMGDRFAVEVKGRIHFDLYPVIRRTINLPTYTLEAVYEAVFGQPKEKVYAEEITTAWETGENLERVARYSMEDAKVTYELGKEFLPMEAQLSRLIGQSLWDVSRSSTGNLVEWFLLRKAYERNELAPNKPDEKELARRRQSYEGGYVKEPERGLWENIVYLDFRSLYPSIIITHNVSPDTLNREGCKEYDVAPQVGHRFCKDFPGFIPSLLGDLLEERQKIKKKMKATIDPIERKLLDYRQRAIKILANSYYGYYGYARARWYCKECAESVTAWGREYITMTIKEIEEKYGFKVIYSDTDGFFATIPGADAETVKKKAMEFLKYINAKLPGALELEYEGFYKRGFFVTKKKYAVIDEEGKITTRGLEIVRRDWSEIAKETQARVLEALLKDGDVEKAVRIVKEVTEKLSKYEVPPEKLVIHEQITRDLKDYKATGPHVAVAKRLAARGVKIRPGTVISYIVLKGSGRIGDRAIPFDEFDPTKHKYDAEYYIENQVLPAVERILRAFGYRKEDLRYQKTRQVGLSAWLKPKGT

SEQ ID NO: 2664 - protein, 774 aa, synthetic construct
MILDTDLITEDGKPVIRIFKKENGEFKIEYDRTFEPYFYALLKDDSAIEEVKKITAERHGTVVTVKRVEKVQKKFLGRPVEVWKLYFTHPQDQPAIADKIREHPAVIDIYEYDIPFAKRYLIDKGLVPMEGDEELKMLAFDIETLYHEGEEFAEGPILMISYADEEGARVITWKNVDLPYVDVVSTEREMIKRFLRVVKEKDPDVLITYNGDNFDFAYLKKRCEKLGINFALGRDGSEPKIQRMGDRFAVEVKGRIHFDLYPVIRRTINLPTYTLEAVYEAVFGQPKEKVYAEEITTAWETGENLERVARYSMEDAKVTYELGKEFLPMEAQLSRLIGQSLWDVSRSSTGNLVEWFLLRKAYERNELAPNKPDEKELARRRQSYEGGYVKEPERGLWENIVYLDFRSLYPSIIITHNVSPDTLNREGCKEYDVAPQVGHRFCKDFPGFIPSLLGDLLEERQKIKKKMKATIDPIERKLLDYRQRAIKILANSYYGYYGYARARWYCKECAESVTAWGREYITMTIKEIEEKYGFKVIYSDTDGFFATIPGADAETVKKKAMEFLKYINAKLPGALELEYEGFYKRGFFVTKKKYAVIDEEGKITTRGLEIVRRDWSEIAKETQARVLEALLKDGDVEKAVRIVKEVTEKLSKYEVPPEKLVIHEQITRDLKDYKATGPHVAVAKRLAARGVKIRPGTVISYIVLKGSGRIGDRAIPFDEFDPTKHKYDAEYYIENQVLPAVERILRAFGYRKEDLRYQKTRQVGLSAWLKPKGT

SEQ ID NO: 2665 - protein, 774 aa, synthetic construct
MILDTDLITEDGKPVIRIFKKENGEFKIEYDRTFEPYFYALLKDDSAIEEVKKITAERHGTVVTVKRVEKVQKKFLGRPVEVWKLYFTHPQDQPAIHDKIREHPAVIDIYEYDIPFAKRYLIDKGLVPMEGDEELKMLAFDIETLYHEGEEFAEGPILMISYADEEGARVITWKNVDLPYVDVVSTEREMIKRFLRVVKEKDPDVLITYNGDNFDFAYLKKRCEKLGINFALGRDGSEPKIQRMGDRFAVEVKGRIHFDLYPVIRRTINLPTYTLEAVYEAVFGQPKEKVYAEEITTAWETGENLERVARYSMEDAKVTYELGKEFLPMEAQLSRLIGQSLWDVSRSSTGNLVEWFLLRKAYERNELAPNKPDEKELARRRQSYEGGYVKEPERGLWENIVYLDFRSLYPSIIITHNVSPDTLNREGCKEYDVAPQVGHRFCKDFPGFIPSLLGDLLEERQKIKKKMKATIDPIERKLLDYRQRAIKILANSYYGYYGYARARWYCKECAESVTAWGREYITMTIKEIEEKYGFKVIYSDTDGFFATIPGADAETVKKKAMEFLKYINAKLPGALELEYEGFYKRGFFVTKKKYAVIDEEGKITTRGLEIVRRDWSEIAKETQARVLEALLKDGDVEKAVRIVKEVTEKLSKYEVPPEKLVIHEQITRDLKDYKATGPHVAVAKRLAARGVKIRPGTVISYIVLKGSGRIGDRAIPFDEFDPTKHKYDAEYYIENQVLPAVERILRAFGYRKEDLRYQKTRQVGLSAWLKPKGT

SEQ ID NO: 2666 - protein, 774 aa, synthetic construct
MILDTDLITEDGKPVIRIFKKENGEFKIEYDRTFEPYFYALLKDDSAIEEVKKITAERHGTVVTVKRVEKVQKKFLGRPVEVWKLYFTHPQDQPAIWDKIREHPAVIDIYEYDIPFAKRYLIDKGLVPMEGDEELKMLAFDIETLYHEGEEFAEGPILMISYADEEGARVITWKNVDLPYVDVVSTEREMIKRFLRVVKEKDPDVLITYNGDNFDFAYLKKRCEKLGINFALGRDGSEPKIQRMGDRFAVEVKGRIHFDLYPVIRRTINLPTYTLEAVYEAVFGQPKEKVYAEEITTAWETGENLERVARYSMEDAKVTYELGKEFLPMEAQLSRLIGQSLWDVSRSSTGNLVEWFLLRKAYERNELAPNKPDEKELARRRQSYEGGYVKEPERGLWENIVYLDFRSLYPSIIITHNVSPDTLNREGCKEYDVAPQVGHRFCKDFPGFIPSLLGDLLEERQKIKKKMKATIDPIERKLLDYRQRAIKILANSYYGYYGYARARWYCKECAESVTAWGREYITMTIKEIEEKYGFKVIYSDTDGFFATIPGADAETVKKKAMEFLKYINAKLPGALELEYEGFYKRGFFVTKKKYAVIDEEGKITTRGLEIVRRDWSEIAKETQARVLEALLKDGDVEKAVRIVKEVTEKLSKYEVPPEKLVIHEQITRDLKDYKATGPHVAVAKRLAARGVKIRPGTVISYIVLKGSGRIGDRAIPFDEFDPTKHKYDAEYYIENQVLPAVERILRAFGYRKEDLRYQKTRQVGLSAWLKPKGT

SEQ ID NO: 2667 - protein, 774 aa, synthetic construct
MILDTDLITEDGKPVIRIFKKENGEFKIEYDRTFEPYFYALLKDDSAIEEVKKITAERHGTVVTVKRVEKVQKKFLGRPVEVWKLYFTHPQDRPAIRDKIREHPAVIDIYEYDIPFAKRYLIDKGLVPMEGDEELKMLAFDIETLYHEGEEFAEGPILMISYADEEGARVITWKNVDLPYVDVVSTEREMIKRFLRVVKEKDPDVLITYNGDNFDFAYLKKRCEKLGINFALGRDGSEPKIQRMGDRFAVEVKGRIHFDLYPVIRRTINLPTYTLEAVYEAVFGQPKEKVYAEEITTAWETGENLERVARYSMEDAKVTYELGKEFLPMEAQLSRLIGQSLWDVSRSSTGNLVEWFLLRKAYERNELAPNKPDEKELARRRQSYEGGYVKEPERGLWENIVYLDFRSLYPSIIITHNVSPDTLNREGCKEYDVAPQVGHRFCKDFPGFIPSLLGDLLEERQKIKKKMKATIDPIERKLLDYRQRAIKILANSYYGYYGYARARWYCKECAESVTAWGREYITMTIKEIEEKYGFKVIYSDTDGFFATIPGADAETVKKKAMEFLKYINAKLPGALELEYEGFYKRGFFVTKKKYAVIDEEGKITTRGLEIVRRDWSEIAKETQARVLEALLKDGDVEKAVRIVKEVTEKLSKYEVPPEKLVIHEQITRDLKDYKATGPHVAVAKRLAARGVKIRPGTVISYIVLKGSGRIGDRAIPFDEFDPTKHKYDAEYYIENQVLPAVERILRAFGYRKEDLRYQKTRQVGLSAWLKPKGT

SEQ ID NO: 2668 - protein, 774 aa, synthetic construct
MILDTDLITEDGKPVIRIFKKENGEFKIEYDRTFEPYFYALLKDDSAIEEVKKITAERHGTVVTVKRVEKVQKKFLGRPVEVWKLYFTHPQDRPAIADKIREHPAVIDIYEYDIPFAKRYLIDKGLVPMEGDEELKMLAFDIETLYHEGEEFAEGPILMISYADEEGARVITWKNVDLPYVDVVSTEREMIKRFLRVVKEKDPDVLITYNGDNFDFAYLKKRCEKLGINFALGRDGSEPKIQRMGDRFAVEVKGRIHFDLYPVIRRTINLPTYTLEAVYEAVFGQPKEKVYAEEITTAWETGENLERVARYSMEDAKVTYELGKEFLPMEAQLSRLIGQSLWDVSRSSTGNLVEWFLLRKAYERNELAPNKPDEKELARRRQSYEGGYVKEPERGLWENIVYLDFRSLYPSIIITHNVSPDTLNREGCKEYDVAPQVGHRFCKDFPGFIPSLLGDLLEERQKIKKKMKATIDPIERKLLDYRQRAIKILANSYYGYYGYARARWYCKECAESVTAWGREYITMTIKEIEEKYGFKVIYSDTDGFFATIPGADAETVKKKAMEFLKYINAKLPGALELEYEGFYKRGFFVTKKKYAVIDEEGKITTRGLEIVRRDWSEIAKETQARVLEALLKDGDVEKAVRIVKEVTEKLSKYEVPPEKLVIHEQITRDLKDYKATGPHVAVAKRLAARGVKIRPGTVISYIVLKGSGRIGDRAIPFDEFDPTKHKYDAEYYIENQVLPAVERILRAFGYRKEDLRYQKTRQVGLSAWLKPKGT

SEQ ID NO: 2669 - protein, 774 aa, synthetic construct
MILDTDLITEDGKPVIRIFKKENGEFKIEYDRTFEPYFYALLKDDSAIEEVKKITAERHGTVVTVKRVEKVQKKFLGRPVEVWKLYFTHPQDRPAIFDKIREHPAVIDIYEYDIPFAKRYLIDKGLVPMEGDEELKMLAFDIETLYHEGEEFAEGPILMISYADEEGARVITWKNVDLPYVDVVSTEREMIKRFLRVVKEKDPDVLITYNGDNFDFAYLKKRCEKLGINFALGRDGSEPKIQRMGDRFAVEVKGRIHFDLYPVIRRTINLPTYTLEAVYEAVFGQPKEKVYAEEITTAWETGENLERVARYSMEDAKVTYELGKEFLPMEAQLSRLIGQSLWDVSRSSTGNLVEWFLLRKAYERNELAPNKPDEKELARRRQSYEGGYVKEPERGLWENIVYLDFRSLYPSIIITHNVSPDTLNREGCKEYDVAPQVGHRFCKDFPGFIPSLLGDLLEERQKIKKKMKATIDPIERKLLDYRQRAIKILANSYYGYYGYARARWYCKECAESVTAWGREYITMTIKEIEEKYGFKVIYSDTDGFFATIPGADAETVKKKAMEFLKYINAKLPGALELEYEGFYKRGFFVTKKKYAVIDEEGKITTRGLEIVRRDWSEIAKETQARVLEALLKDGDVEKAVRIVKEVTEKLSKYEVPPEKLVIHEQITRDLKDYKATGPHVAVAKRLAARGVKIRPGTVISYIVLKGSGRIGDRAIPFDEFDPTKHKYDAEYYIENQVLPAVERILRAFGYRKEDLRYQKTRQVGLSAWLKPKGT

SEQ ID NO: 2670 - protein, 774 aa, synthetic construct
MILDTDLITEDGKPVIRIFKKENGEFKIEYDRTFEPYFYALLKDDSAIEEVKKITAERHGTVVTVKRVEKVQKKFLGRPVEVWKLYFTHPQDRPAIWDKIREHPAVIDIYEYDIPFAKRYLIDKGLVPMEGDEELKMLAFDIETLYHEGEEFAEGPILMISYADEEGARVITWKNVDLPYVDVVSTEREMIKRFLRVVKEKDPDVLITYNGDNFDFAYLKKRCEKLGINFALGRDGSEPKIQRMGDRFAVEVKGRIHFDLYPVIRRTINLPTYTLEAVYEAVFGQPKEKVYAEEITTAWETGENLERVARYSMEDAKVTYELGKEFLPMEAQLSRLIGQSLWDVSRSSTGNLVEWFLLRKAYERNELAPNKPDEKELARRRQSYEGGYVKEPERGLWENIVYLDFRSLYPSIIITHNVSPDTLNREGCKEYDVAPQVGHRFCKDFPGFIPSLLGDLLEERQKIKKKMKATIDPIERKLLDYRQRAIKILANSYYGYYGYARARWYCKECAESVTAWGREYITMTIKEIEEKYGFKVIYSDTDGFFATIPGADAETVKKKAMEFLKYINAKLPGALELEYEGFYKRGFFVTKKKYAVIDEEGKITTRGLEIVRRDWSEIAKETQARVLEALLKDGDVEKAVRIVKEVTEKLSKYEVPPEKLVIHEQITRDLKDYKATGPHVAVAKRLAARGVKIRPGTVISYIVLKGSGRIGDRAIPFDEFDPTKHKYDAEYYIENQVLPAVERILRAFGYRKEDLRYQKTRQVGLSAWLKPKGT

SEQ ID NO: 2671 - protein, 774 aa, synthetic construct
MILDTDMITEDGKPVFRIFKKENGEFKIEYDRTFEPYFYALLKDDSAIEEVKKITAERHGTVVTVKRVEKVQKKFLGRPVEVWKLYFTHPQDVPAIRDKIREHPAVIDIYEYDIPFAKRYLIDKGLVPMEGDEELKMLAFDIETLYHEGEEFAEGPILMISYADEEGARVITWKNVDLPYVDVVSTEREMIKRFLRVVKEKDPDVLITYNGDNFDFAYLKKRCEKLGINFALGRDGSEPKIQRMGDRFAVEVKGRIHFDLYPVIRRTINLPTYTLEAVYEAVFGQPKEKVYAEEITTAWETGENLERVARYSMEDAKVTYELGKEFLPMEAQLSRLIGQSLWDVSRSSTGNLVEWFLLRKAYERNELAPNKPDEKELARRRQSYEGGYVKEPERGLWENIVYLDFRSLYPSIIITHNVSPDTLNREGCKEYDVAPQVGHRFCKDFPGFIPSLLGDLLEERQKIKKKMKATIDPIERKLLDYRQRAIKILANSYYGYYGYARARWYCKECAESVTAWGREYITMTIKEIEEKYGFKVIYSDTDGFFATIPGADAETVKKKAMEFLKYINAKLPGALELEYEGFYKRGFFVTKKKYAVIDEEGKITTRGLEIVRRDWSEIAKETQARVLEALLKDGDVEKAVRIVKEVTEKLSKYEVPPEKLVIHEQITRDLKDYKATGPHVAVAKRLAARGVKIRPGTVISYIVLKGSGRIGDRAIPFDEFDPTKHKYDAEYYIENQVLPAVERILRAFGYRKEDLRYQKTRQVGLSAWLKPKGT

SEQ ID NO: 2672 - protein, 774 aa, synthetic construct
MILDTDMITEDGKPVFRIFKKENGEFKIEYDRTFEAYFYALLKDDSAIEEVKKITAERHGTVVTVKRVEKVQKKFLGRPVEVWKLYFTHPQDVPAIRDKIREHPAVIDIYEYDIPFAKRYLIDKGLVPMEGDEELKMLAFDIETLYHEGEEFAEGPILMISYADEEGARVITWKNVDLPYVDVVSTEREMIKRFLRVVKEKDPDVLITYNGDNFDFAYLKKRCEKLGINFALGRDGSEPKIQRMGDRFAVEVKGRIHFDLYPVIRRTINLPTYTLEAVYEAVFGQPKEKVYAEEITTAWETGENLERVARYSMEDAKVTYELGKEFLPMEAQLSRLIGQSLWDVSRSSTGNLVEWFLLRKAYERNELAPNKPDEKELARRRQSYEGGYVKEPERGLWENIVYLDFRSLYPSIIITHNVSPDTLNREGCKEYDVAPQVGHRFCKDFPGFIPSLLGDLLEERQKIKKKMKATIDPIERKLLDYRQRAIKILANSYYGYYGYARARWYCKECAESVTAWGREYITMTIKEIEEKYGFKVIYSDTDGFFATIPGADAETVKKKAMEFLKYINAKLPGALELEYEGFYKRGFFVTKKKYAVIDEEGKITTRGLEIVRRDWSEIAKETQARVLEALLKDGDVEKAVRIVKEVTEKLSKYEVPPEKLVIHEQITRDLKDYKATGPHVAVAKRLAARGVKIRPGTVISYIVLKGSGRIGDRAIPFDEFDPTKHKYDAEYYIENQVLPAVERILRAFGYRKEDLRYQKTRQVGLSAWLKPKGT

SEQ ID NO: 2673 - protein, 774 aa, synthetic construct
MILDTDMITEDGKPVFRIFKKENGEFKIEYDRTFEAYFYALLKDDSAIEEVKKITAERHGTVVTVKRVEKVQKKFLGRPVEVWKLYFTHFQDVPAIRDKIREHPAVIDIYEYDIPFAKRYLIDKGLVPMEGDEELKMLAFDIETLYHEGEEFAEGPILMISYADEEGARVITWKNVDLPYVDVVSTEREMIKRFLRVVKEKDPDVLITYNGDNFDFAYLKKRCEKLGINFALGRDGSEPKIQRMGDRFAVEVKGRIHFDLYPVIRRTINLPTYTLEAVYEAVFGQPKEKVYAEEITTAWETGENLERVARYSMEDAKVTYELGKEFLPMEAQLSRLIGQSLWDVSRSSTGNLVEWFLLRKAYERNELAPNKPDEKELARRRQSYEGGYVKEPERGLWENIVYLDFRSLYPSIIITHNVSPDTLNREGCKEYDVAPQVGHRFCKDFPGFIPSLLGDLLEERQKIKKKMKATIDPIERKLLDYRQRAIKILANSYYGYYGYARARWYCKECAESVTAWGREYITMTIKEIEEKYGFKVIYSDTDGFFATIPGADAETVKKKAMEFLKYINAKLPGALELEYEGFYKRGFFVTKKKYAVIDEEGKITTRGLEIVRRDWSEIAKETQARVLEALLKDGDVEKAVRIVKEVTEKLSKYEVPPEKLVIHEQITRDLKDYKATGPHVAVAKRLAARGVKIRPGTVISYIVLKGSGRIGDRAIPFDEFDPTKHKYDAEYYIENQVLPAVERILRAFGYRKEDLRYQKTRQVGLSAWLKPKGT

SEQ ID NO: 2674 - protein, 774 aa, synthetic construct
MILDTDMITEDGKPVFRIFKKENGEFKIEYDRTFEAYFYALLKDDSAIEEVKKITAERHGTVVTVKRVEKVQKKFLGRPVEVWKLYFTHFQDIPAIRDKIREHPAVIDIYEYDIPFAKRYLIDKGLVPMEGDEELKMLAFDIETLYHEGEEFAEGPILMISYADEEGARVITWKNVDLPYVDVVSTEREMIKRFLRVVKEKDPDVLITYNGDNFDFAYLKKRCEKLGINFALGRDGSEPKIQRMGDRFAVEVKGRIHFDLYPVIRRTINLPTYTLEAVYEAVFGQPKEKVYAEEITTAWETGENLERVARYSMEDAKVTYELGKEFLPMEAQLSRLIGQSLWDVSRSSTGNLVEWFLLRKAYERNELAPNKPDEKELARRRQSYEGGYVKEPERGLWENIVYLDFRSLYPSIIITHNVSPDTLNREGCKEYDVAPQVGHRFCKDFPGFIPSLLGDLLEERQKIKKKMKATIDPIERKLLDYRQRAIKILANSYYGYYGYARARWYCKECAESVTAWGREYITMTIKEIEEKYGFKVIYSDTDGFFATIPGADAETVKKKAMEFLKYINAKLPGALELEYEGFYKRGFFVTKKKYAVIDEEGKITTRGLEIVRRDWSEIAKETQARVLEALLKDGDVEKAVRIVKEVTEKLSKYEVPPEKLVIHEQITRDLKDYKATGPHVAVAKRLAARGVKIRPGTVISYIVLKGSGRIGDRAIPFDEFDPTKHKYDAEYYIENQVLPAVERILRAFGYRKEDLRYQKTRQVGLSAWLKPKGT

SEQ ID NO: 2675 - protein, 774 aa, synthetic construct
MILDTDMITEDGKPVFRIFKKENGEFKIEYDRTFEAYFYALLKDDSAIEEVKKITAERHGTVVTVKRVEKVQKKFLGRPVEVWKLYFTHWQDIPAIRDKIREHPAVIDIYEYDIPFAKRYLIDKGLVPMEGDEELKMLAFDIETLYHEGEEFAEGPILMISYADEEGARVITWKNVDLPYVDVVSTEREMIKRFLRVVKEKDPDVLITYNGDNFDFAYLKKRCEKLGINFALGRDGSEPKIQRMGDRFAVEVKGRIHFDLYPVIRRTINLPTYTLEAVYEAVFGQPKEKVYAEEITTAWETGENLERVARYSMEDAKVTYELGKEFLPMEAQLSRLIGQSLWDVSRSSTGNLVEWFLLRKAYERNELAPNKPDEKELARRRQSYEGGYVKEPERGLWENIVYLDFRSLYPSIIITHNVSPDTLNREGCKEYDVAPQVGHRFCKDFPGFIPSLLGDLLEERQKIKKKMKATIDPIERKLLDYRQRAIKILANSYYGYYGYARARWYCKECAESVTAWGREYITMTIKEIEEKYGFKVIYSDTDGFFATIPGADAETVKKKAMEFLKYINAKLPGALELEYEGFYKRGFFVTKKKYAVIDEEGKITTRGLEIVRRDWSEIAKETQARVLEALLKDGDVEKAVRIVKEVTEKLSKYEVPPEKLVIHEQITRDLKDYKATGPHVAVAKRLAARGVKIRPGTVISYIVLKGSGRIGDRAIPFDEFDPTKHKYDAEYYIENQVLPAVERILRAFGYRKEDLRYQKTRQVGLSAWLKPKGT

SEQ ID NO: 2676 - protein, 774 aa, synthetic construct
MILDTDMITEDGKPVFRIFKKENGEFKIEYDRTFEAYFYALLKDDSAIEEVKKITAERHGTVVTVKRVEKVQKKFLGRPVEVWKLYFTHYQDIPAIADKIREHPAVIDIYEYDIPFAKRYLIDKGLVPMEGDEELKMLAFDIETLYHEGEEFAEGPILMISYADEEGARVITWKNVDLPYVDVVSTEREMIKRFLRVVKEKDPDVLITYNGDNFDFAYLKKRCEKLGINFALGRDGSEPKIQRMGDRFAVEVKGRIHFDLYPVIRRTINLPTYTLEAVYEAVFGQPKEKVYAEEITTAWETGENLERVARYSMEDAKVTYELGKEFLPMEAQLSRLIGQSLWDVSRSSTGNLVEWFLLRKAYERNELAPNKPDEKELARRRQSYEGGYVKEPERGLWENIVYLDFRSLYPSIIITHNVSPDTLNREGCKEYDVAPQVGHRFCKDFPGFIPSLLGDLLEERQKIKKKMKATIDPIERKLLDYRQRAIKILANSYYGYYGYARARWYCKECAESVTAWGREYITMTIKEIEEKYGFKVIYSDTDGFFATIPGADAETVKKKAMEFLKYINAKLPGALELEYEGFYKRGFFVTKKKYAVIDEEGKITTRGLEIVRRDWSEIAKETQARVLEALLKDGDVEKAVRIVKEVTEKLSKYEVPPEKLVIHEQITRDLKDYKATGPHVAVAKRLAARGVKIRPGTVISYIVLKGSGRIGDRAIPFDEFDPTKHKYDAEYYIENQVLPAVERILRAFGYRKEDLRYQKTRQVGLSAWLKPKGT

SEQ ID NO: 2677 - protein, 774 aa, synthetic construct
MILDTDMITEDGKPVFRIFKKENGEFKIEYDRTFEAYFYALLKDDSAIEEVKKITAERHGTVVTVKRVEKVQKKFLGRPVEVWKLYFTHPQDVPAIADKIREHPAVIDIYEYDIPFAKRYLIDKGLVPMEGDEELKMLAFDIETLYHEGEEFAEGPILMISYADEEGARVITWKNVDLPYVDVVSTEREMIKRFLRVVKEKDPDVLITYNGDNFDFAYLKKRCEKLGINFALGRDGSEPKIQRMGDRFAVEVKGRIHFDLYPVIRRTINLPTYTLEAVYEAVFGQPKEKVYAEEITTAWETGENLERVARYSMEDAKVTYELGKEFLPMEAQLSRLIGQSLWDVSRSSTGNLVEWFLLRKAYERNELAPNKPDEKELARRRQSYEGGYVKEPERGLWENIVYLDFRSLYPSIIITHNVSPDTLNREGCKEYDVAPQVGHRFCKDFPGFIPSLLGDLLEERQKIKKKMKATIDPIERKLLDYRQRAIKILANSYYGYYGYARARWYCKECAESVTAWGREYITMTIKEIEEKYGFKVIYSDTDGFFATIPGADAETVKKKAMEFLKYINAKLPGALELEYEGFYKRGFFVTKKKYAVIDEEGKITTRGLEIVRRDWSEIAKETQARVLEALLKDGDVEKAVRIVKEVTEKLSKYEVPPEKLVIHEQITRDLKDYKATGPHVAVAKRLAARGVKIRPGTVISYIVLKGSGRIGDRAIPFDEFDPTKHKYDAEYYIENQVLPAVERILRAFGYRKEDLRYQKTRQVGLSAWLKPKGT

SEQ ID NO: 2678 - protein, 774 aa, synthetic construct
MILDTDMITEDGKPVFRIFKKENGEFKIEYDRTFEAYFYALLKDDSAIEEVKKITAERHGTVVTVKRVEKVQKKFLGRPVEVWKLYFTHPQDIPAIRDKIREHPAVIDIYEYDIPFAKRYLIDKGLVPMEGDEELKMLAFDIETLYHEGEEFAEGPILMISYADEEGARVITWKNVDLPYVDVVSTEREMIKRFLRVVKEKDPDVLITYNGDNFDFAYLKKRCEKLGINFALGRDGSEPKIQRMGDRFAVEVKGRIHFDLYPVIRRTINLPTYTLEAVYEAVFGQPKEKVYAEEITTAWETGENLERVARYSMEDAKVTYELGKEFLPMEAQLSRLIGQSLWDVSRSSTGNLVEWFLLRKAYERNELAPNKPDEKELARRRQSYEGGYVKEPERGLWENIVYLDFRSLYPSIIITHNVSPDTLNREGCKEYDVAPQVGHRFCKDFPGFIPSLLGDLLEERQKIKKKMKATIDPIERKLLDYRQRAIKILANSYYGYYGYARARWYCKECAESVTAWGREYITMTIKEIEEKYGFKVIYSDTDGFFATIPGADAETVKKKAMEFLKYINAKLPGALELEYEGFYKRGFFVTKKKYAVIDEEGKITTRGLEIVRRDWSEIAKETQARVLEALLKDGDVEKAVRIVKEVTEKLSKYEVPPEKLVIHEQITRDLKDYKATGPHVAVAKRLAARGVKIRPGTVISYIVLKGSGRIGDRAIPFDEFDPTKHKYDAEYYIENQVLPAVERILRAFGYRKEDLRYQKTRQVGLSAWLKPKGT

SEQ ID NO: 2679 - protein, 774 aa, synthetic construct
MILDTDMITEDGKPVFRIFKKENGEFKIEYDRTFEAYFYALLKDDSAIEEVKKITAERHGTVVTVKRVEKVQKKFLGRPVEVWKLYFTHPQDIPAIADKIREHPAVIDIYEYDIPFAKRYLIDKGLVPMEGDEELKMLAFDIETLYHEGEEFAEGPILMISYADEEGARVITWKNVDLPYVDVVSTEREMIKRFLRVVKEKDPDVLITYNGDNFDFAYLKKRCEKLGINFALGRDGSEPKIQRMGDRFAVEVKGRIHFDLYPVIRRTINLPTYTLEAVYEAVFGQPKEKVYAEEITTAWETGENLERVARYSMEDAKVTYELGKEFLPMEAQLSRLIGQSLWDVSRSSTGNLVEWFLLRKAYERNELAPNKPDEKELARRRQSYEGGYVKEPERGLWENIVYLDFRSLYPSIIITHNVSPDTLNREGCKEYDVAPQVGHRFCKDFPGFIPSLLGDLLEERQKIKKKMKATIDPIERKLLDYRQRAIKILANSYYGYYGYARARWYCKECAESVTAWGREYITMTIKEIEEKYGFKVIYSDTDGFFATIPGADAETVKKKAMEFLKYINAKLPGALELEYEGFYKRGFFVTKKKYAVIDEEGKITTRGLEIVRRDWSEIAKETQARVLEALLKDGDVEKAVRIVKEVTEKLSKYEVPPEKLVIHEQITRDLKDYKATGPHVAVAKRLAARGVKIRPGTVISYIVLKGSGRIGDRAIPFDEFDPTKHKYDAEYYIENQVLPAVERILRAFGYRKEDLRYQKTRQVGLSAWLKPKGT

SEQ ID NO: 2680 - protein, 774 aa, synthetic construct
MILDTDMITEDGKPVFRIFKKENGEFKIEYDRTFEAYFYALLKDDSAIEEVKKITAERHGTVVTVKRVEKVQKKFLGRPVEVWKLYFTHPQDIPAIFDKIREHPAVIDIYEYDIPFAKRYLIDKGLVPMEGDEELKMLAFDIETLYHEGEEFAEGPILMISYADEEGARVITWKNVDLPYVDVVSTEREMIKRFLRVVKEKDPDVLITYNGDNFDFAYLKKRCEKLGINFALGRDGSEPKIQRMGDRFAVEVKGRIHFDLYPVIRRTINLPTYTLEAVYEAVFGQPKEKVYAEEITTAWETGENLERVARYSMEDAKVTYELGKEFLPMEAQLSRLIGQSLWDVSRSSTGNLVEWFLLRKAYERNELAPNKPDEKELARRRQSYEGGYVKEPERGLWENIVYLDFRSLYPSIIITHNVSPDTLNREGCKEYDVAPQVGHRFCKDFPGFIPSLLGDLLEERQKIKKKMKATIDPIERKLLDYRQRAIKILANSYYGYYGYARARWYCKECAESVTAWGREYITMTIKEIEEKYGFKVIYSDTDGFFATIPGADAETVKKKAMEFLKYINAKLPGALELEYEGFYKRGFFVTKKKYAVIDEEGKITTRGLEIVRRDWSEIAKETQARVLEALLKDGDVEKAVRIVKEVTEKLSKYEVPPEKLVIHEQITRDLKDYKATGPHVAVAKRLAARGVKIRPGTVISYIVLKGSGRIGDRAIPFDEFDPTKHKYDAEYYIENQVLPAVERILRAFGYRKEDLRYQKTRQVGLSAWLKPKGT

SEQ ID NO: 2681 - protein, 774 aa, synthetic construct
MILDTDMITEDGKPVFRIFKKENGEFKIEYDRTFEAYFYALLKDDSAIEEVKKITAERHGTVVTVKRVEKVQKKFLGRPVEVWKLYFTHPQDQPAIRDKIREHPAVIDIYEYDIPFAKRYLIDKGLVPMEGDEELKMLAFDIETLYHEGEEFAEGPILMISYADEEGARVITWKNVDLPYVDVVSTEREMIKRFLRVVKEKDPDVLITYNGDNFDFAYLKKRCEKLGINFALGRDGSEPKIQRMGDRFAVEVKGRIHFDLYPVIRRTINLPTYTLEAVYEAVFGQPKEKVYAEEITTAWETGENLERVARYSMEDAKVTYELGKEFLPMEAQLSRLIGQSLWDVSRSSTGNLVEWFLLRKAYERNELAPNKPDEKELARRRQSYEGGYVKEPERGLWENIVYLDFRSLYPSIIITHNVSPDTLNREGCKEYDVAPQVGHRFCKDFPGFIPSLLGDLLEERQKIKKKMKATIDPIERKLLDYRQRAIKILANSYYGYYGYARARWYCKECAESVTAWGREYITMTIKEIEEKYGFKVIYSDTDGFFATIPGADAETVKKKAMEFLKYINAKLPGALELEYEGFYKRGFFVTKKKYAVIDEEGKITTRGLEIVRRDWSEIAKETQARVLEALLKDGDVEKAVRIVKEVTEKLSKYEVPPEKLVIHEQITRDLKDYKATGPHVAVAKRLAARGVKIRPGTVISYIVLKGSGRIGDRAIPFDEFDPTKHKYDAEYYIENQVLPAVERILRAFGYRKEDLRYQKTRQVGLSAWLKPKGT

SEQ ID NO: 2682 - protein, 774 aa, synthetic construct
MILDTDMITEDGKPVFRIFKKENGEFKIEYDRTFEHYFYALLKDDSAIEEVKKITAERHGTVVTVKRVEKVQKKFLGRPVEVWKLYFTHPQDVPAIRDKIREHPAVIDIYEYDIPFAKRYLIDKGLVPMEGDEELKMLAFDIETLYHEGEEFAEGPILMISYADEEGARVITWKNVDLPYVDVVSTEREMIKRFLRVVKEKDPDVLITYNGDNFDFAYLKKRCEKLGINFALGRDGSEPKIQRMGDRFAVEVKGRIHFDLYPVIRRTINLPTYTLEAVYEAVFGQPKEKVYAEEITTAWETGENLERVARYSMEDAKVTYELGKEFLPMEAQLSRLIGQSLWDVSRSSTGNLVEWFLLRKAYERNELAPNKPDEKELARRRQSYEGGYVKEPERGLWENIVYLDFRSLYPSIIITHNVSPDTLNREGCKEYDVAPQVGHRFCKDFPGFIPSLLGDLLEERQKIKKKMKATIDPIERKLLDYRQRAIKILANSYYGYYGYARARWYCKECAESVTAWGREYITMTIKEIEEKYGFKVIYSDTDGFFATIPGADAETVKKKAMEFLKYINAKLPGALELEYEGFYKRGFFVTKKKYAVIDEEGKITTRGLEIVRRDWSEIAKETQARVLEALLKDGDVEKAVRIVKEVTEKLSKYEVPPEKLVIHEQITRDLKDYKATGPHVAVAKRLAARGVKIRPGTVISYIVLKGSGRIGDRAIPFDEFDPTKHKYDAEYYIENQVLPAVERILRAFGYRKEDLRYQKTRQVGLSAWLKPKGT

SEQ ID NO: 2683 - protein, 774 aa, synthetic construct
MILDTDMITEDGKPVFRIFKKENGEFKIEYDRTFEHYFYALLKDDSAIEEVKKITAERHGTVVTVKRVEKVQKKFLGRPVEVWKLYFTHPQDIPAIRDKIREHPAVIDIYEYDIPFAKRYLIDKGLVPMEGDEELKMLAFDIETLYHEGEEFAEGPILMISYADEEGARVITWKNVDLPYVDVVSTEREMIKRFLRVVKEKDPDVLITYNGDNFDFAYLKKRCEKLGINFALGRDGSEPKIQRMGDRFAVEVKGRIHFDLYPVIRRTINLPTYTLEAVYEAVFGQPKEKVYAEEITTAWETGENLERVARYSMEDAKVTYELGKEFLPMEAQLSRLIGQSLWDVSRSSTGNLVEWFLLRKAYERNELAPNKPDEKELARRRQSYEGGYVKEPERGLWENIVYLDFRSLYPSIIITHNVSPDTLNREGCKEYDVAPQVGHRFCKDFPGFIPSLLGDLLEERQKIKKKMKATIDPIERKLLDYRQRAIKILANSYYGYYGYARARWYCKECAESVTAWGREYITMTIKEIEEKYGFKVIYSDTDGFFATIPGADAETVKKKAMEFLKYINAKLPGALELEYEGFYKRGFFVTKKKYAVIDEEGKITTRGLEIVRRDWSEIAKETQARVLEALLKDGDVEKAVRIVKEVTEKLSKYEVPPEKLVIHEQITRDLKDYKATGPHVAVAKRLAARGVKIRPGTVISYIVLKGSGRIGDRAIPFDEFDPTKHKYDAEYYIENQVLPAVERILRAFGYRKEDLRYQKTRQVGLSAWLKPKGT

SEQ ID NO: 2684 - protein, 774 aa, synthetic construct
MILDTDMITEDGKPVFRIFKKENGEFKIEYDRTFESYFYALLKDDSAIEEVKKITAERHGTVVTVKRVEKVQKKFLGRPVEVWKLYFTHPQDIPAIRDKIREHPAVIDIYEYDIPFAKRYLIDKGLVPMEGDEELKMLAFDIETLYHEGEEFAEGPILMISYADEEGARVITWKNVDLPYVDVVSTEREMIKRFLRVVKEKDPDVLITYNGDNFDFAYLKKRCEKLGINFALGRDGSEPKIQRMGDRFAVEVKGRIHFDLYPVIRRTINLPTYTLEAVYEAVFGQPKEKVYAEEITTAWETGENLERVARYSMEDAKVTYELGKEFLPMEAQLSRLIGQSLWDVSRSSTGNLVEWFLLRKAYERNELAPNKPDEKELARRRQSYEGGYVKEPERGLWENIVYLDFRSLYPSIIITHNVSPDTLNREGCKEYDVAPQVGHRFCKDFPGFIPSLLGDLLEERQKIKKKMKATIDPIERKLLDYRQRAIKILANSYYGYYGYARARWYCKECAESVTAWGREYITMTIKEIEEKYGFKVIYSDTDGFFATIPGADAETVKKKAMEFLKYINAKLPGALELEYEGFYKRGFFVTKKKYAVIDEEGKITTRGLEIVRRDWSEIAKETQARVLEALLKDGDVEKAVRIVKEVTEKLSKYEVPPEKLVIHEQITRDLKDYKATGPHVAVAKRLAARGVKIRPGTVISYIVLKGSGRIGDRAIPFDEFDPTKHKYDAEYYIENQVLPAVERILRAFGYRKEDLRYQKTRQVGLSAWLKPKGT

SEQ ID NO: 2685 - protein, 774 aa, synthetic construct
MILDTDMITEDGKPVFRIFKKENGEFKIEYDRTFEWYFYALLKDDSAIEEVKKITAERHGTVVTVKRVEKVQKKFLGRPVEVWKLYFTHPQDVPAIRDKIREHPAVIDIYEYDIPFAKRYLIDKGLVPMEGDEELKMLAFDIETLYHEGEEFAEGPILMISYADEEGARVITWKNVDLPYVDVVSTEREMIKRFLRVVKEKDPDVLITYNGDNFDFAYLKKRCEKLGINFALGRDGSEPKIQRMGDRFAVEVKGRIHFDLYPVIRRTINLPTYTLEAVYEAVFGQPKEKVYAEEITTAWETGENLERVARYSMEDAKVTYELGKEFLPMEAQLSRLIGQSLWDVSRSSTGNLVEWFLLRKAYERNELAPNKPDEKELARRRQSYEGGYVKEPERGLWENIVYLDFRSLYPSIIITHNVSPDTLNREGCKEYDVAPQVGHRFCKDFPGFIPSLLGDLLEERQKIKKKMKATIDPIERKLLDYRQRAIKILANSYYGYYGYARARWYCKECAESVTAWGREYITMTIKEIEEKYGFKVIYSDTDGFFATIPGADAETVKKKAMEFLKYINAKLPGALELEYEGFYKRGFFVTKKKYAVIDEEGKITTRGLEIVRRDWSEIAKETQARVLEALLKDGDVEKAVRIVKEVTEKLSKYEVPPEKLVIHEQITRDLKDYKATGPHVAVAKRLAARGVKIRPGTVISYIVLKGSGRIGDRAIPFDEFDPTKHKYDAEYYIENQVLPAVERILRAFGYRKEDLRYQKTRQVGLSAWLKPKGT

SEQ ID NO: 2686 - protein, 774 aa, synthetic construct
MILDTDMITEDGKPVFRIFKKENGEFKIEYDRTFEWYFYALLKDDSAIEEVKKITAERHGTVVTVKRVEKVQKKFLGRPVEVWKLYFTHPQDVPAIADKIREHPAVIDIYEYDIPFAKRYLIDKGLVPMEGDEELKMLAFDIETLYHEGEEFAEGPILMISYADEEGARVITWKNVDLPYVDVVSTEREMIKRFLRVVKEKDPDVLITYNGDNFDFAYLKKRCEKLGINFALGRDGSEPKIQRMGDRFAVEVKGRIHFDLYPVIRRTINLPTYTLEAVYEAVFGQPKEKVYAEEITTAWETGENLERVARYSMEDAKVTYELGKEFLPMEAQLSRLIGQSLWDVSRSSTGNLVEWFLLRKAYERNELAPNKPDEKELARRRQSYEGGYVKEPERGLWENIVYLDFRSLYPSIIITHNVSPDTLNREGCKEYDVAPQVGHRFCKDFPGFIPSLLGDLLEERQKIKKKMKATIDPIERKLLDYRQRAIKILANSYYGYYGYARARWYCKECAESVTAWGREYITMTIKEIEEKYGFKVIYSDTDGFFATIPGADAETVKKKAMEFLKYINAKLPGALELEYEGFYKRGFFVTKKKYAVIDEEGKITTRGLEIVRRDWSEIAKETQARVLEALLKDGDVEKAVRIVKEVTEKLSKYEVPPEKLVIHEQITRDLKDYKATGPHVAVAKRLAARGVKIRPGTVISYIVLKGSGRIGDRAIPFDEFDPTKHKYDAEYYIENQVLPAVERILRAFGYRKEDLRYQKTRQVGLSAWLKPKGT

SEQ ID NO: 2687 - protein, 774 aa, synthetic construct
MILDTDMITEDGKPVFRIFKKENGEFKIEYDRTFEPYFYALLKDDSAIEEVKKITAERHGTVVTVKRVEKVQKKFLGRPVEVWKLYFTHFQDVPAIRDKIREHPAVIDIYEYDIPFAKRYLIDKGLVPMEGDEELKMLAFDIETLYHEGEEFAEGPILMISYADEEGARVITWKNVDLPYVDVVSTEREMIKRFLRVVKEKDPDVLITYNGDNFDFAYLKKRCEKLGINFALGRDGSEPKIQRMGDRFAVEVKGRIHFDLYPVIRRTINLPTYTLEAVYEAVFGQPKEKVYAEEITTAWETGENLERVARYSMEDAKVTYELGKEFLPMEAQLSRLIGQSLWDVSRSSTGNLVEWFLLRKAYERNELAPNKPDEKELARRRQSYEGGYVKEPERGLWENIVYLDFRSLYPSIIITHNVSPDTLNREGCKEYDVAPQVGHRFCKDFPGFIPSLLGDLLEERQKIKKKMKATIDPIERKLLDYRQRAIKILANSYYGYYGYARARWYCKECAESVTAWGREYITMTIKEIEEKYGFKVIYSDTDGFFATIPGADAETVKKKAMEFLKYINAKLPGALELEYEGFYKRGFFVTKKKYAVIDEEGKITTRGLEIVRRDWSEIAKETQARVLEALLKDGDVEKAVRIVKEVTEKLSKYEVPPEKLVIHEQITRDLKDYKATGPHVAVAKRLAARGVKIRPGTVISYIVLKGSGRIGDRAIPFDEFDPTKHKYDAEYYIENQVLPAVERILRAFGYRKEDLRYQKTRQVGLSAWLKPKGT

SEQ ID NO: 2688 - protein, 774 aa, synthetic construct
MILDTDMITEDGKPVFRIFKKENGEFKIEYDRTFEPYFYALLKDDSAIEEVKKITAERHGTVVTVKRVEKVQKKFLGRPVEVWKLYFTHFQDVPAIADKIREHPAVIDIYEYDIPFAKRYLIDKGLVPMEGDEELKMLAFDIETLYHEGEEFAEGPILMISYADEEGARVITWKNVDLPYVDVVSTEREMIKRFLRVVKEKDPDVLITYNGDNFDFAYLKKRCEKLGINFALGRDGSEPKIQRMGDRFAVEVKGRIHFDLYPVIRRTINLPTYTLEAVYEAVFGQPKEKVYAEEITTAWETGENLERVARYSMEDAKVTYELGKEFLPMEAQLSRLIGQSLWDVSRSSTGNLVEWFLLRKAYERNELAPNKPDEKELARRRQSYEGGYVKEPERGLWENIVYLDFRSLYPSIIITHNVSPDTLNREGCKEYDVAPQVGHRFCKDFPGFIPSLLGDLLEERQKIKKKMKATIDPIERKLLDYRQRAIKILANSYYGYYGYARARWYCKECAESVTAWGREYITMTIKEIEEKYGFKVIYSDTDGFFATIPGADAETVKKKAMEFLKYINAKLPGALELEYEGFYKRGFFVTKKKYAVIDEEGKITTRGLEIVRRDWSEIAKETQARVLEALLKDGDVEKAVRIVKEVTEKLSKYEVPPEKLVIHEQITRDLKDYKATGPHVAVAKRLAARGVKIRPGTVISYIVLKGSGRIGDRAIPFDEFDPTKHKYDAEYYIENQVLPAVERILRAFGYRKEDLRYQKTRQVGLSAWLKPKGT

SEQ ID NO: 2689 - protein, 774 aa, synthetic construct
MILDTDMITEDGKPVFRIFKKENGEFKIEYDRTFEPYFYALLKDDSAIEEVKKITAERHGTVVTVKRVEKVQKKFLGRPVEVWKLYFTHFQDVPAIHDKIREHPAVIDIYEYDIPFAKRYLIDKGLVPMEGDEELKMLAFDIETLYHEGEEFAEGPILMISYADEEGARVITWKNVDLPYVDVVSTEREMIKRFLRVVKEKDPDVLITYNGDNFDFAYLKKRCEKLGINFALGRDGSEPKIQRMGDRFAVEVKGRIHFDLYPVIRRTINLPTYTLEAVYEAVFGQPKEKVYAEEITTAWETGENLERVARYSMEDAKVTYELGKEFLPMEAQLSRLIGQSLWDVSRSSTGNLVEWFLLRKAYERNELAPNKPDEKELARRRQSYEGGYVKEPERGLWENIVYLDFRSLYPSIIITHNVSPDTLNREGCKEYDVAPQVGHRFCKDFPGFIPSLLGDLLEERQKIKKKMKATIDPIERKLLDYRQRAIKILANSYYGYYGYARARWYCKECAESVTAWGREYITMTIKEIEEKYGFKVIYSDTDGFFATIPGADAETVKKKAMEFLKYINAKLPGALELEYEGFYKRGFFVTKKKYAVIDEEGKITTRGLEIVRRDWSEIAKETQARVLEALLKDGDVEKAVRIVKEVTEKLSKYEVPPEKLVIHEQITRDLKDYKATGPHVAVAKRLAARGVKIRPGTVISYIVLKGSGRIGDRAIPFDEFDPTKHKYDAEYYIENQVLPAVERILRAFGYRKEDLRYQKTRQVGLSAWLKPKGT

SEQ ID NO: 2690 - protein, 774 aa, synthetic construct
MILDTDMITEDGKPVFRIFKKENGEFKIEYDRTFEPYFYALLKDDSAIEEVKKITAERHGTVVTVKRVEKVQKKFLGRPVEVWKLYFTHFQDIPAIRDKIREHPAVIDIYEYDIPFAKRYLIDKGLVPMEGDEELKMLAFDIETLYHEGEEFAEGPILMISYADEEGARVITWKNVDLPYVDVVSTEREMIKRFLRVVKEKDPDVLITYNGDNFDFAYLKKRCEKLGINFALGRDGSEPKIQRMGDRFAVEVKGRIHFDLYPVIRRTINLPTYTLEAVYEAVFGQPKEKVYAEEITTAWETGENLERVARYSMEDAKVTYELGKEFLPMEAQLSRLIGQSLWDVSRSSTGNLVEWFLLRKAYERNELAPNKPDEKELARRRQSYEGGYVKEPERGLWENIVYLDFRSLYPSIIITHNVSPDTLNREGCKEYDVAPQVGHRFCKDFPGFIPSLLGDLLEERQKIKKKMKATIDPIERKLLDYRQRAIKILANSYYGYYGYARARWYCKECAESVTAWGREYITMTIKEIEEKYGFKVIYSDTDGFFATIPGADAETVKKKAMEFLKYINAKLPGALELEYEGFYKRGFFVTKKKYAVIDEEGKITTRGLEIVRRDWSEIAKETQARVLEALLKDGDVEKAVRIVKEVTEKLSKYEVPPEKLVIHEQITRDLKDYKATGPHVAVAKRLAARGVKIRPGTVISYIVLKGSGRIGDRAIPFDEFDPTKHKYDAEYYIENQVLPAVERILRAFGYRKEDLRYQKTRQVGLSAWLKPKGT

SEQ ID NO: 2691 - protein, 774 aa, synthetic construct
MILDTDMITEDGKPVFRIFKKENGEFKIEYDRTFEPYFYALLKDDSAIEEVKKITAERHGTVVTVKRVEKVQKKFLGRPVEVWKLYFTHFQDIPAIADKIREHPAVIDIYEYDIPFAKRYLIDKGLVPMEGDEELKMLAFDIETLYHEGEEFAEGPILMISYADEEGARVITWKNVDLPYVDVVSTEREMIKRFLRVVKEKDPDVLITYNGDNFDFAYLKKRCEKLGINFALGRDGSEPKIQRMGDRFAVEVKGRIHFDLYPVIRRTINLPTYTLEAVYEAVFGQPKEKVYAEEITTAWETGENLERVARYSMEDAKVTYELGKEFLPMEAQLSRLIGQSLWDVSRSSTGNLVEWFLLRKAYERNELAPNKPDEKELARRRQSYEGGYVKEPERGLWENIVYLDFRSLYPSIIITHNVSPDTLNREGCKEYDVAPQVGHRFCKDFPGFIPSLLGDLLEERQKIKKKMKATIDPIERKLLDYRQRAIKILANSYYGYYGYARARWYCKECAESVTAWGREYITMTIKEIEEKYGFKVIYSDTDGFFATIPGADAETVKKKAMEFLKYINAKLPGALELEYEGFYKRGFFVTKKKYAVIDEEGKITTRGLEIVRRDWSEIAKETQARVLEALLKDGDVEKAVRIVKEVTEKLSKYEVPPEKLVIHEQITRDLKDYKATGPHVAVAKRLAARGVKIRPGTVISYIVLKGSGRIGDRAIPFDEFDPTKHKYDAEYYIENQVLPAVERILRAFGYRKEDLRYQKTRQVGLSAWLKPKGT

SEQ ID NO: 2692 - protein, 774 aa, synthetic construct
MILDTDMITEDGKPVFRIFKKENGEFKIEYDRTFEPYFYALLKDDSAIEEVKKITAERHGTVVTVKRVEKVQKKFLGRPVEVWKLYFTHFQDIPAIFDKIREHPAVIDIYEYDIPFAKRYLIDKGLVPMEGDEELKMLAFDIETLYHEGEEFAEGPILMISYADEEGARVITWKNVDLPYVDVVSTEREMIKRFLRVVKEKDPDVLITYNGDNFDFAYLKKRCEKLGINFALGRDGSEPKIQRMGDRFAVEVKGRIHFDLYPVIRRTINLPTYTLEAVYEAVFGQPKEKVYAEEITTAWETGENLERVARYSMEDAKVTYELGKEFLPMEAQLSRLIGQSLWDVSRSSTGNLVEWFLLRKAYERNELAPNKPDEKELARRRQSYEGGYVKEPERGLWENIVYLDFRSLYPSIIITHNVSPDTLNREGCKEYDVAPQVGHRFCKDFPGFIPSLLGDLLEERQKIKKKMKATIDPIERKLLDYRQRAIKILANSYYGYYGYARARWYCKECAESVTAWGREYITMTIKEIEEKYGFKVIYSDTDGFFATIPGADAETVKKKAMEFLKYINAKLPGALELEYEGFYKRGFFVTKKKYAVIDEEGKITTRGLEIVRRDWSEIAKETQARVLEALLKDGDVEKAVRIVKEVTEKLSKYEVPPEKLVIHEQITRDLKDYKATGPHVAVAKRLAARGVKIRPGTVISYIVLKGSGRIGDRAIPFDEFDPTKHKYDAEYYIENQVLPAVERILRAFGYRKEDLRYQKTRQVGLSAWLKPKGT

SEQ ID NO: 2693 - protein, 774 aa, synthetic construct
MILDTDMITEDGKPVFRIFKKENGEFKIEYDRTFEPYFYALLKDDSAIEEVKKITAERHGTVVTVKRVEKVQKKFLGRPVEVWKLYFTHFQDIPAIHDKIREHPAVIDIYEYDIPFAKRYLIDKGLVPMEGDEELKMLAFDIETLYHEGEEFAEGPILMISYADEEGARVITWKNVDLPYVDVVSTEREMIKRFLRVVKEKDPDVLITYNGDNFDFAYLKKRCEKLGINFALGRDGSEPKIQRMGDRFAVEVKGRIHFDLYPVIRRTINLPTYTLEAVYEAVFGQPKEKVYAEEITTAWETGENLERVARYSMEDAKVTYELGKEFLPMEAQLSRLIGQSLWDVSRSSTGNLVEWFLLRKAYERNELAPNKPDEKELARRRQSYEGGYVKEPERGLWENIVYLDFRSLYPSIIITHNVSPDTLNREGCKEYDVAPQVGHRFCKDFPGFIPSLLGDLLEERQKIKKKMKATIDPIERKLLDYRQRAIKILANSYYGYYGYARARWYCKECAESVTAWGREYITMTIKEIEEKYGFKVIYSDTDGFFATIPGADAETVKKKAMEFLKYINAKLPGALELEYEGFYKRGFFVTKKKYAVIDEEGKITTRGLEIVRRDWSEIAKETQARVLEALLKDGDVEKAVRIVKEVTEKLSKYEVPPEKLVIHEQITRDLKDYKATGPHVAVAKRLAARGVKIRPGTVISYIVLKGSGRIGDRAIPFDEFDPTKHKYDAEYYIENQVLPAVERILRAFGYRKEDLRYQKTRQVGLSAWLKPKGT

SEQ ID NO: 2694 - protein, 774 aa, synthetic construct
MILDTDMITEDGKPVFRIFKKENGEFKIEYDRTFEPYFYALLKDDSAIEEVKKITAERHGTVVTVKRVEKVQKKFLGRPVEVWKLYFTHFQDQPAIRDKIREHPAVIDIYEYDIPFAKRYLIDKGLVPMEGDEELKMLAFDIETLYHEGEEFAEGPILMISYADEEGARVITWKNVDLPYVDVVSTEREMIKRFLRVVKEKDPDVLITYNGDNFDFAYLKKRCEKLGINFALGRDGSEPKIQRMGDRFAVEVKGRIHFDLYPVIRRTINLPTYTLEAVYEAVFGQPKEKVYAEEITTAWETGENLERVARYSMEDAKVTYELGKEFLPMEAQLSRLIGQSLWDVSRSSTGNLVEWFLLRKAYERNELAPNKPDEKELARRRQSYEGGYVKEPERGLWENIVYLDFRSLYPSIIITHNVSPDTLNREGCKEYDVAPQVGHRFCKDFPGFIPSLLGDLLEERQKIKKKMKATIDPIERKLLDYRQRAIKILANSYYGYYGYARARWYCKECAESVTAWGREYITMTIKEIEEKYGFKVIYSDTDGFFATIPGADAETVKKKAMEFLKYINAKLPGALELEYEGFYKRGFFVTKKKYAVIDEEGKITTRGLEIVRRDWSEIAKETQARVLEALLKDGDVEKAVRIVKEVTEKLSKYEVPPEKLVIHEQITRDLKDYKATGPHVAVAKRLAARGVKIRPGTVISYIVLKGSGRIGDRAIPFDEFDPTKHKYDAEYYIENQVLPAVERILRAFGYRKEDLRYQKTRQVGLSAWLKPKGT

SEQ ID NO: 2695 - protein, 774 aa, synthetic construct
MILDTDMITEDGKPVFRIFKKENGEFKIEYDRTFEPYFYALLKDDSAIEEVKKITAERHGTVVTVKRVEKVQKKFLGRPVEVWKLYFTHFQDQPAIWDKIREHPAVIDIYEYDIPFAKRYLIDKGLVPMEGDEELKMLAFDIETLYHEGEEFAEGPILMISYADEEGARVITWKNVDLPYVDVVSTEREMIKRFLRVVKEKDPDVLITYNGDNFDFAYLKKRCEKLGINFALGRDGSEPKIQRMGDRFAVEVKGRIHFDLYPVIRRTINLPTYTLEAVYEAVFGQPKEKVYAEEITTAWETGENLERVARYSMEDAKVTYELGKEFLPMEAQLSRLIGQSLWDVSRSSTGNLVEWFLLRKAYERNELAPNKPDEKELARRRQSYEGGYVKEPERGLWENIVYLDFRSLYPSIIITHNVSPDTLNREGCKEYDVAPQVGHRFCKDFPGFIPSLLGDLLEERQKIKKKMKATIDPIERKLLDYRQRAIKILANSYYGYYGYARARWYCKECAESVTAWGREYITMTIKEIEEKYGFKVIYSDTDGFFATIPGADAETVKKKAMEFLKYINAKLPGALELEYEGFYKRGFFVTKKKYAVIDEEGKITTRGLEIVRRDWSEIAKETQARVLEALLKDGDVEKAVRIVKEVTEKLSKYEVPPEKLVIHEQITRDLKDYKATGPHVAVAKRLAARGVKIRPGTVISYIVLKGSGRIGDRAIPFDEFDPTKHKYDAEYYIENQVLPAVERILRAFGYRKEDLRYQKTRQVGLSAWLKPKGT

SEQ ID NO: 2696 - protein, 774 aa, synthetic construct
MILDTDMITEDGKPVFRIFKKENGEFKIEYDRTFEPYFYALLKDDSAIEEVKKITAERHGTVVTVKRVEKVQKKFLGRPVEVWKLYFTHFQDRPAIADKIREHPAVIDIYEYDIPFAKRYLIDKGLVPMEGDEELKMLAFDIETLYHEGEEFAEGPILMISYADEEGARVITWKNVDLPYVDVVSTEREMIKRFLRVVKEKDPDVLITYNGDNFDFAYLKKRCEKLGINFALGRDGSEPKIQRMGDRFAVEVKGRIHFDLYPVIRRTINLPTYTLEAVYEAVFGQPKEKVYAEEITTAWETGENLERVARYSMEDAKVTYELGKEFLPMEAQLSRLIGQSLWDVSRSSTGNLVEWFLLRKAYERNELAPNKPDEKELARRRQSYEGGYVKEPERGLWENIVYLDFRSLYPSIIITHNVSPDTLNREGCKEYDVAPQVGHRFCKDFPGFIPSLLGDLLEERQKIKKKMKATIDPIERKLLDYRQRAIKILANSYYGYYGYARARWYCKECAESVTAWGREYITMTIKEIEEKYGFKVIYSDTDGFFATIPGADAETVKKKAMEFLKYINAKLPGALELEYEGFYKRGFFVTKKKYAVIDEEGKITTRGLEIVRRDWSEIAKETQARVLEALLKDGDVEKAVRIVKEVTEKLSKYEVPPEKLVIHEQITRDLKDYKATGPHVAVAKRLAARGVKIRPGTVISYIVLKGSGRIGDRAIPFDEFDPTKHKYDAEYYIENQVLPAVERILRAFGYRKEDLRYQKTRQVGLSAWLKPKGT

SEQ ID NO: 2697 - protein, 774 aa, synthetic construct
MILDTDMITEDGKPVFRIFKKENGEFKIEYDRTFEPYFYALLKDDSAIEEVKKITAERHGTVVTVKRVEKVQKKFLGRPVEVWKLYFTHIQDVPAIRDKIREHPAVIDIYEYDIPFAKRYLIDKGLVPMEGDEELKMLAFDIETLYHEGEEFAEGPILMISYADEEGARVITWKNVDLPYVDVVSTEREMIKRFLRVVKEKDPDVLITYNGDNFDFAYLKKRCEKLGINFALGRDGSEPKIQRMGDRFAVEVKGRIHFDLYPVIRRTINLPTYTLEAVYEAVFGQPKEKVYAEEITTAWETGENLERVARYSMEDAKVTYELGKEFLPMEAQLSRLIGQSLWDVSRSSTGNLVEWFLLRKAYERNELAPNKPDEKELARRRQSYEGGYVKEPERGLWENIVYLDFRSLYPSIIITHNVSPDTLNREGCKEYDVAPQVGHRFCKDFPGFIPSLLGDLLEERQKIKKKMKATIDPIERKLLDYRQRAIKILANSYYGYYGYARARWYCKECAESVTAWGREYITMTIKEIEEKYGFKVIYSDTDGFFATIPGADAETVKKKAMEFLKYINAKLPGALELEYEGFYKRGFFVTKKKYAVIDEEGKITTRGLEIVRRDWSEIAKETQARVLEALLKDGDVEKAVRIVKEVTEKLSKYEVPPEKLVIHEQITRDLKDYKATGPHVAVAKRLAARGVKIRPGTVISYIVLKGSGRIGDRAIPFDEFDPTKHKYDAEYYIENQVLPAVERILRAFGYRKEDLRYQKTRQVGLSAWLKPKGT

SEQ ID NO: 2698 - protein, 774 aa, synthetic construct
MILDTDMITEDGKPVFRIFKKENGEFKIEYDRTFEPYFYALLKDDSAIEEVKKITAERHGTVVTVKRVEKVQKKFLGRPVEVWKLYFTHIQDVPAIWDKIREHPAVIDIYEYDIPFAKRYLIDKGLVPMEGDEELKMLAFDIETLYHEGEEFAEGPILMISYADEEGARVITWKNVDLPYVDVVSTEREMIKRFLRVVKEKDPDVLITYNGDNFDFAYLKKRCEKLGINFALGRDGSEPKIQRMGDRFAVEVKGRIHFDLYPVIRRTINLPTYTLEAVYEAVFGQPKEKVYAEEITTAWETGENLERVARYSMEDAKVTYELGKEFLPMEAQLSRLIGQSLWDVSRSSTGNLVEWFLLRKAYERNELAPNKPDEKELARRRQSYEGGYVKEPERGLWENIVYLDFRSLYPSIIITHNVSPDTLNREGCKEYDVAPQVGHRFCKDFPGFIPSLLGDLLEERQKIKKKMKATIDPIERKLLDYRQRAIKILANSYYGYYGYARARWYCKECAESVTAWGREYITMTIKEIEEKYGFKVIYSDTDGFFATIPGADAETVKKKAMEFLKYINAKLPGALELEYEGFYKRGFFVTKKKYAVIDEEGKITTRGLEIVRRDWSEIAKETQARVLEALLKDGDVEKAVRIVKEVTEKLSKYEVPPEKLVIHEQITRDLKDYKATGPHVAVAKRLAARGVKIRPGTVISYIVLKGSGRIGDRAIPFDEFDPTKHKYDAEYYIENQVLPAVERILRAFGYRKEDLRYQKTRQVGLSAWLKPKGT

SEQ ID NO: 2699 - protein, 774 aa, synthetic construct
MILDTDMITEDGKPVFRIFKKENGEFKIEYDRTFEPYFYALLKDDSAIEEVKKITAERHGTVVTVKRVEKVQKKFLGRPVEVWKLYFTHIQDIPAIRDKIREHPAVIDIYEYDIPFAKRYLIDKGLVPMEGDEELKMLAFDIETLYHEGEEFAEGPILMISYADEEGARVITWKNVDLPYVDVVSTEREMIKRFLRVVKEKDPDVLITYNGDNFDFAYLKKRCEKLGINFALGRDGSEPKIQRMGDRFAVEVKGRIHFDLYPVIRRTINLPTYTLEAVYEAVFGQPKEKVYAEEITTAWETGENLERVARYSMEDAKVTYELGKEFLPMEAQLSRLIGQSLWDVSRSSTGNLVEWFLLRKAYERNELAPNKPDEKELARRRQSYEGGYVKEPERGLWENIVYLDFRSLYPSIIITHNVSPDTLNREGCKEYDVAPQVGHRFCKDFPGFIPSLLGDLLEERQKIKKKMKATIDPIERKLLDYRQRAIKILANSYYGYYGYARARWYCKECAESVTAWGREYITMTIKEIEEKYGFKVIYSDTDGFFATIPGADAETVKKKAMEFLKYINAKLPGALELEYEGFYKRGFFVTKKKYAVIDEEGKITTRGLEIVRRDWSEIAKETQARVLEALLKDGDVEKAVRIVKEVTEKLSKYEVPPEKLVIHEQITRDLKDYKATGPHVAVAKRLAARGVKIRPGTVISYIVLKGSGRIGDRAIPFDEFDPTKHKYDAEYYIENQVLPAVERILRAFGYRKEDLRYQKTRQVGLSAWLKPKGT

SEQ ID NO: 2700 - protein, 774 aa, synthetic construct
MILDTDMITEDGKPVFRIFKKENGEFKIEYDRTFEPYFYALLKDDSAIEEVKKITAERHGTVVTVKRVEKVQKKFLGRPVEVWKLYFTHIQDIPAIADKIREHPAVIDIYEYDIPFAKRYLIDKGLVPMEGDEELKMLAFDIETLYHEGEEFAEGPILMISYADEEGARVITWKNVDLPYVDVVSTEREMIKRFLRVVKEKDPDVLITYNGDNFDFAYLKKRCEKLGINFALGRDGSEPKIQRMGDRFAVEVKGRIHFDLYPVIRRTINLPTYTLEAVYEAVFGQPKEKVYAEEITTAWETGENLERVARYSMEDAKVTYELGKEFLPMEAQLSRLIGQSLWDVSRSSTGNLVEWFLLRKAYERNELAPNKPDEKELARRRQSYEGGYVKEPERGLWENIVYLDFRSLYPSIIITHNVSPDTLNREGCKEYDVAPQVGHRFCKDFPGFIPSLLGDLLEERQKIKKKMKATIDPIERKLLDYRQRAIKILANSYYGYYGYARARWYCKECAESVTAWGREYITMTIKEIEEKYGFKVIYSDTDGFFATIPGADAETVKKKAMEFLKYINAKLPGALELEYEGFYKRGFFVTKKKYAVIDEEGKITTRGLEIVRRDWSEIAKETQARVLEALLKDGDVEKAVRIVKEVTEKLSKYEVPPEKLVIHEQITRDLKDYKATGPHVAVAKRLAARGVKIRPGTVISYIVLKGSGRIGDRAIPFDEFDPTKHKYDAEYYIENQVLPAVERILRAFGYRKEDLRYQKTRQVGLSAWLKPKGT

SEQ ID NO: 2701 - protein, 774 aa, synthetic construct
MILDTDMITEDGKPVFRIFKKENGEFKIEYDRTFEPYFYALLKDDSAIEEVKKITAERHGTVVTVKRVEKVQKKFLGRPVEVWKLYFTHIQDIPAIFDKIREHPAVIDIYEYDIPFAKRYLIDKGLVPMEGDEELKMLAFDIETLYHEGEEFAEGPILMISYADEEGARVITWKNVDLPYVDVVSTEREMIKRFLRVVKEKDPDVLITYNGDNFDFAYLKKRCEKLGINFALGRDGSEPKIQRMGDRFAVEVKGRIHFDLYPVIRRTINLPTYTLEAVYEAVFGQPKEKVYAEEITTAWETGENLERVARYSMEDAKVTYELGKEFLPMEAQLSRLIGQSLWDVSRSSTGNLVEWFLLRKAYERNELAPNKPDEKELARRRQSYEGGYVKEPERGLWENIVYLDFRSLYPSIIITHNVSPDTLNREGCKEYDVAPQVGHRFCKDFPGFIPSLLGDLLEERQKIKKKMKATIDPIERKLLDYRQRAIKILANSYYGYYGYARARWYCKECAESVTAWGREYITMTIKEIEEKYGFKVIYSDTDGFFATIPGADAETVKKKAMEFLKYINAKLPGALELEYEGFYKRGFFVTKKKYAVIDEEGKITTRGLEIVRRDWSEIAKETQARVLEALLKDGDVEKAVRIVKEVTEKLSKYEVPPEKLVIHEQITRDLKDYKATGPHVAVAKRLAARGVKIRPGTVISYIVLKGSGRIGDRAIPFDEFDPTKHKYDAEYYIENQVLPAVERILRAFGYRKEDLRYQKTRQVGLSAWLKPKGT

SEQ ID NO: 2702 - protein, 774 aa, synthetic construct
MILDTDMITEDGKPVFRIFKKENGEFKIEYDRTFEPYFYALLKDDSAIEEVKKITAERHGTVVTVKRVEKVQKKFLGRPVEVWKLYFTHIQDIPAIHDKIREHPAVIDIYEYDIPFAKRYLIDKGLVPMEGDEELKMLAFDIETLYHEGEEFAEGPILMISYADEEGARVITWKNVDLPYVDVVSTEREMIKRFLRVVKEKDPDVLITYNGDNFDFAYLKKRCEKLGINFALGRDGSEPKIQRMGDRFAVEVKGRIHFDLYPVIRRTINLPTYTLEAVYEAVFGQPKEKVYAEEITTAWETGENLERVARYSMEDAKVTYELGKEFLPMEAQLSRLIGQSLWDVSRSSTGNLVEWFLLRKAYERNELAPNKPDEKELARRRQSYEGGYVKEPERGLWENIVYLDFRSLYPSIIITHNVSPDTLNREGCKEYDVAPQVGHRFCKDFPGFIPSLLGDLLEERQKIKKKMKATIDPIERKLLDYRQRAIKILANSYYGYYGYARARWYCKECAESVTAWGREYITMTIKEIEEKYGFKVIYSDTDGFFATIPGADAETVKKKAMEFLKYINAKLPGALELEYEGFYKRGFFVTKKKYAVIDEEGKITTRGLEIVRRDWSEIAKETQARVLEALLKDGDVEKAVRIVKEVTEKLSKYEVPPEKLVIHEQITRDLKDYKATGPHVAVAKRLAARGVKIRPGTVISYIVLKGSGRIGDRAIPFDEFDPTKHKYDAEYYIENQVLPAVERILRAFGYRKEDLRYQKTRQVGLSAWLKPKGT

SEQ ID NO: 2703 - protein, 774 aa, synthetic construct
MILDTDMITEDGKPVFRIFKKENGEFKIEYDRTFEPYFYALLKDDSAIEEVKKITAERHGTVVTVKRVEKVQKKFLGRPVEVWKLYFTHIQDQPAIRDKIREHPAVIDIYEYDIPFAKRYLIDKGLVPMEGDEELKMLAFDIETLYHEGEEFAEGPILMISYADEEGARVITWKNVDLPYVDVVSTEREMIKRFLRVVKEKDPDVLITYNGDNFDFAYLKKRCEKLGINFALGRDGSEPKIQRMGDRFAVEVKGRIHFDLYPVIRRTINLPTYTLEAVYEAVFGQPKEKVYAEEITTAWETGENLERVARYSMEDAKVTYELGKEFLPMEAQLSRLIGQSLWDVSRSSTGNLVEWFLLRKAYERNELAPNKPDEKELARRRQSYEGGYVKEPERGLWENIVYLDFRSLYPSIIITHNVSPDTLNREGCKEYDVAPQVGHRFCKDFPGFIPSLLGDLLEERQKIKKKMKATIDPIERKLLDYRQRAIKILANSYYGYYGYARARWYCKECAESVTAWGREYITMTIKEIEEKYGFKVIYSDTDGFFATIPGADAETVKKKAMEFLKYINAKLPGALELEYEGFYKRGFFVTKKKYAVIDEEGKITTRGLEIVRRDWSEIAKETQARVLEALLKDGDVEKAVRIVKEVTEKLSKYEVPPEKLVIHEQITRDLKDYKATGPHVAVAKRLAARGVKIRPGTVISYIVLKGSGRIGDRAIPFDEFDPTKHKYDAEYYIENQVLPAVERILRAFGYRKEDLRYQKTRQVGLSAWLKPKGT

SEQ ID NO: 2704 - protein, 774 aa, synthetic construct
MILDTDMITEDGKPVFRIFKKENGEFKIEYDRTFEPYFYALLKDDSAIEEVKKITAERHGTVVTVKRVEKVQKKFLGRPVEVWKLYFTHIQDQPAIHDKIREHPAVIDIYEYDIPFAKRYLIDKGLVPMEGDEELKMLAFDIETLYHEGEEFAEGPILMISYADEEGARVITWKNVDLPYVDVVSTEREMIKRFLRVVKEKDPDVLITYNGDNFDFAYLKKRCEKLGINFALGRDGSEPKIQRMGDRFAVEVKGRIHFDLYPVIRRTINLPTYTLEAVYEAVFGQPKEKVYAEEITTAWETGENLERVARYSMEDAKVTYELGKEFLPMEAQLSRLIGQSLWDVSRSSTGNLVEWFLLRKAYERNELAPNKPDEKELARRRQSYEGGYVKEPERGLWENIVYLDFRSLYPSIIITHNVSPDTLNREGCKEYDVAPQVGHRFCKDFPGFIPSLLGDLLEERQKIKKKMKATIDPIERKLLDYRQRAIKILANSYYGYYGYARARWYCKECAESVTAWGREYITMTIKEIEEKYGFKVIYSDTDGFFATIPGADAETVKKKAMEFLKYINAKLPGALELEYEGFYKRGFFVTKKKYAVIDEEGKITTRGLEIVRRDWSEIAKETQARVLEALLKDGDVEKAVRIVKEVTEKLSKYEVPPEKLVIHEQITRDLKDYKATGPHVAVAKRLAARGVKIRPGTVISYIVLKGSGRIGDRAIPFDEFDPTKHKYDAEYYIENQVLPAVERILRAFGYRKEDLRYQKTRQVGLSAWLKPKGT

SEQ ID NO: 2705 - protein, 774 aa, synthetic construct
MILDTDMITEDGKPVFRIFKKENGEFKIEYDRTFEPYFYALLKDDSAIEEVKKITAERHGTVVTVKRVEKVQKKFLGRPVEVWKLYFTHIQDRPAIRDKIREHPAVIDIYEYDIPFAKRYLIDKGLVPMEGDEELKMLAFDIETLYHEGEEFAEGPILMISYADEEGARVITWKNVDLPYVDVVSTEREMIKRFLRVVKEKDPDVLITYNGDNFDFAYLKKRCEKLGINFALGRDGSEPKIQRMGDRFAVEVKGRIHFDLYPVIRRTINLPTYTLEAVYEAVFGQPKEKVYAEEITTAWETGENLERVARYSMEDAKVTYELGKEFLPMEAQLSRLIGQSLWDVSRSSTGNLVEWFLLRKAYERNELAPNKPDEKELARRRQSYEGGYVKEPERGLWENIVYLDFRSLYPSIIITHNVSPDTLNREGCKEYDVAPQVGHRFCKDFPGFIPSLLGDLLEERQKIKKKMKATIDPIERKLLDYRQRAIKILANSYYGYYGYARARWYCKECAESVTAWGREYITMTIKEIEEKYGFKVIYSDTDGFFATIPGADAETVKKKAMEFLKYINAKLPGALELEYEGFYKRGFFVTKKKYAVIDEEGKITTRGLEIVRRDWSEIAKETQARVLEALLKDGDVEKAVRIVKEVTEKLSKYEVPPEKLVIHEQITRDLKDYKATGPHVAVAKRLAARGVKIRPGTVISYIVLKGSGRIGDRAIPFDEFDPTKHKYDAEYYIENQVLPAVERILRAFGYRKEDLRYQKTRQVGLSAWLKPKGT

SEQ ID NO: 2706 - protein, 774 aa, synthetic construct
MILDTDMITEDGKPVFRIFKKENGEFKIEYDRTFEPYFYALLKDDSAIEEVKKITAERHGTVVTVKRVEKVQKKFLGRPVEVWKLYFTHIQDRPAIFDKIREHPAVIDIYEYDIPFAKRYLIDKGLVPMEGDEELKMLAFDIETLYHEGEEFAEGPILMISYADEEGARVITWKNVDLPYVDVVSTEREMIKRFLRVVKEKDPDVLITYNGDNFDFAYLKKRCEKLGINFALGRDGSEPKIQRMGDRFAVEVKGRIHFDLYPVIRRTINLPTYTLEAVYEAVFGQPKEKVYAEEITTAWETGENLERVARYSMEDAKVTYELGKEFLPMEAQLSRLIGQSLWDVSRSSTGNLVEWFLLRKAYERNELAPNKPDEKELARRRQSYEGGYVKEPERGLWENIVYLDFRSLYPSIIITHNVSPDTLNREGCKEYDVAPQVGHRFCKDFPGFIPSLLGDLLEERQKIKKKMKATIDPIERKLLDYRQRAIKILANSYYGYYGYARARWYCKECAESVTAWGREYITMTIKEIEEKYGFKVIYSDTDGFFATIPGADAETVKKKAMEFLKYINAKLPGALELEYEGFYKRGFFVTKKKYAVIDEEGKITTRGLEIVRRDWSEIAKETQARVLEALLKDGDVEKAVRIVKEVTEKLSKYEVPPEKLVIHEQITRDLKDYKATGPHVAVAKRLAARGVKIRPGTVISYIVLKGSGRIGDRAIPFDEFDPTKHKYDAEYYIENQVLPAVERILRAFGYRKEDLRYQKTRQVGLSAWLKPKGT

SEQ ID NO: 2707 - protein, 774 aa, synthetic construct
MILDTDMITEDGKPVFRIFKKENGEFKIEYDRTFEPYFYALLKDDSAIEEVKKITAERHGTVVTVKRVEKVQKKFLGRPVEVWKLYFTHSQDVPAIADKIREHPAVIDIYEYDIPFAKRYLIDKGLVPMEGDEELKMLAFDIETLYHEGEEFAEGPILMISYADEEGARVITWKNVDLPYVDVVSTEREMIKRFLRVVKEKDPDVLITYNGDNFDFAYLKKRCEKLGINFALGRDGSEPKIQRMGDRFAVEVKGRIHFDLYPVIRRTINLPTYTLEAVYEAVFGQPKEKVYAEEITTAWETGENLERVARYSMEDAKVTYELGKEFLPMEAQLSRLIGQSLWDVSRSSTGNLVEWFLLRKAYERNELAPNKPDEKELARRRQSYEGGYVKEPERGLWENIVYLDFRSLYPSIIITHNVSPDTLNREGCKEYDVAPQVGHRFCKDFPGFIPSLLGDLLEERQKIKKKMKATIDPIERKLLDYRQRAIKILANSYYGYYGYARARWYCKECAESVTAWGREYITMTIKEIEEKYGFKVIYSDTDGFFATIPGADAETVKKKAMEFLKYINAKLPGALELEYEGFYKRGFFVTKKKYAVIDEEGKITTRGLEIVRRDWSEIAKETQARVLEALLKDGDVEKAVRIVKEVTEKLSKYEVPPEKLVIHEQITRDLKDYKATGPHVAVAKRLAARGVKIRPGTVISYIVLKGSGRIGDRAIPFDEFDPTKHKYDAEYYIENQVLPAVERILRAFGYRKEDLRYQKTRQVGLSAWLKPKGT

SEQ ID NO: 2708 - protein, 774 aa, synthetic construct
MILDTDMITEDGKPVFRIFKKENGEFKIEYDRTFEPYFYALLKDDSAIEEVKKITAERHGTVVTVKRVEKVQKKFLGRPVEVWKLYFTHSQDVPAIHDKIREHPAVIDIYEYDIPFAKRYLIDKGLVPMEGDEELKMLAFDIETLYHEGEEFAEGPILMISYADEEGARVITWKNVDLPYVDVVSTEREMIKRFLRVVKEKDPDVLITYNGDNFDFAYLKKRCEKLGINFALGRDGSEPKIQRMGDRFAVEVKGRIHFDLYPVIRRTINLPTYTLEAVYEAVFGQPKEKVYAEEITTAWETGENLERVARYSMEDAKVTYELGKEFLPMEAQLSRLIGQSLWDVSRSSTGNLVEWFLLRKAYERNELAPNKPDEKELARRRQSYEGGYVKEPERGLWENIVYLDFRSLYPSIIITHNVSPDTLNREGCKEYDVAPQVGHRFCKDFPGFIPSLLGDLLEERQKIKKKMKATIDPIERKLLDYRQRAIKILANSYYGYYGYARARWYCKECAESVTAWGREYITMTIKEIEEKYGFKVIYSDTDGFFATIPGADAETVKKKAMEFLKYINAKLPGALELEYEGFYKRGFFVTKKKYAVIDEEGKITTRGLEIVRRDWSEIAKETQARVLEALLKDGDVEKAVRIVKEVTEKLSKYEVPPEKLVIHEQITRDLKDYKATGPHVAVAKRLAARGVKIRPGTVISYIVLKGSGRIGDRAIPFDEFDPTKHKYDAEYYIENQVLPAVERILRAFGYRKEDLRYQKTRQVGLSAWLKPKGT

SEQ ID NO: 2709 - protein, 774 aa, synthetic construct
MILDTDMITEDGKPVFRIFKKENGEFKIEYDRTFEPYFYALLKDDSAIEEVKKITAERHGTVVTVKRVEKVQKKFLGRPVEVWKLYFTHSQDIPAIRDKIREHPAVIDIYEYDIPFAKRYLIDKGLVPMEGDEELKMLAFDIETLYHEGEEFAEGPILMISYADEEGARVITWKNVDLPYVDVVSTEREMIKRFLRVVKEKDPDVLITYNGDNFDFAYLKKRCEKLGINFALGRDGSEPKIQRMGDRFAVEVKGRIHFDLYPVIRRTINLPTYTLEAVYEAVFGQPKEKVYAEEITTAWETGENLERVARYSMEDAKVTYELGKEFLPMEAQLSRLIGQSLWDVSRSSTGNLVEWFLLRKAYERNELAPNKPDEKELARRRQSYEGGYVKEPERGLWENIVYLDFRSLYPSIIITHNVSPDTLNREGCKEYDVAPQVGHRFCKDFPGFIPSLLGDLLEERQKIKKKMKATIDPIERKLLDYRQRAIKILANSYYGYYGYARARWYCKECAESVTAWGREYITMTIKEIEEKYGFKVIYSDTDGFFATIPGADAETVKKKAMEFLKYINAKLPGALELEYEGFYKRGFFVTKKKYAVIDEEGKITTRGLEIVRRDWSEIAKETQARVLEALLKDGDVEKAVRIVKEVTEKLSKYEVPPEKLVIHEQITRDLKDYKATGPHVAVAKRLAARGVKIRPGTVISYIVLKGSGRIGDRAIPFDEFDPTKHKYDAEYYIENQVLPAVERILRAFGYRKEDLRYQKTRQVGLSAWLKPKGT

SEQ ID NO: 2710 - protein, 774 aa, synthetic construct
MILDTDMITEDGKPVFRIFKKENGEFKIEYDRTFEPYFYALLKDDSAIEEVKKITAERHGTVVTVKRVEKVQKKFLGRPVEVWKLYFTHSQDIPAIADKIREHPAVIDIYEYDIPFAKRYLIDKGLVPMEGDEELKMLAFDIETLYHEGEEFAEGPILMISYADEEGARVITWKNVDLPYVDVVSTEREMIKRFLRVVKEKDPDVLITYNGDNFDFAYLKKRCEKLGINFALGRDGSEPKIQRMGDRFAVEVKGRIHFDLYPVIRRTINLPTYTLEAVYEAVFGQPKEKVYAEEITTAWETGENLERVARYSMEDAKVTYELGKEFLPMEAQLSRLIGQSLWDVSRSSTGNLVEWFLLRKAYERNELAPNKPDEKELARRRQSYEGGYVKEPERGLWENIVYLDFRSLYPSIIITHNVSPDTLNREGCKEYDVAPQVGHRFCKDFPGFIPSLLGDLLEERQKIKKKMKATIDPIERKLLDYRQRAIKILANSYYGYYGYARARWYCKECAESVTAWGREYITMTIKEIEEKYGFKVIYSDTDGFFATIPGADAETVKKKAMEFLKYINAKLPGALELEYEGFYKRGFFVTKKKYAVIDEEGKITTRGLEIVRRDWSEIAKETQARVLEALLKDGDVEKAVRIVKEVTEKLSKYEVPPEKLVIHEQITRDLKDYKATGPHVAVAKRLAARGVKIRPGTVISYIVLKGSGRIGDRAIPFDEFDPTKHKYDAEYYIENQVLPAVERILRAFGYRKEDLRYQKTRQVGLSAWLKPKGT

SEQ ID NO: 2711 - protein, 774 aa, synthetic construct
MILDTDMITEDGKPVFRIFKKENGEFKIEYDRTFEPYFYALLKDDSAIEEVKKITAERHGTVVTVKRVEKVQKKFLGRPVEVWKLYFTHSQDIPAIFDKIREHPAVIDIYEYDIPFAKRYLIDKGLVPMEGDEELKMLAFDIETLYHEGEEFAEGPILMISYADEEGARVITWKNVDLPYVDVVSTEREMIKRFLRVVKEKDPDVLITYNGDNFDFAYLKKRCEKLGINFALGRDGSEPKIQRMGDRFAVEVKGRIHFDLYPVIRRTINLPTYTLEAVYEAVFGQPKEKVYAEEITTAWETGENLERVARYSMEDAKVTYELGKEFLPMEAQLSRLIGQSLWDVSRSSTGNLVEWFLLRKAYERNELAPNKPDEKELARRRQSYEGGYVKEPERGLWENIVYLDFRSLYPSIIITHNVSPDTLNREGCKEYDVAPQVGHRFCKDFPGFIPSLLGDLLEERQKIKKKMKATIDPIERKLLDYRQRAIKILANSYYGYYGYARARWYCKECAESVTAWGREYITMTIKEIEEKYGFKVIYSDTDGFFATIPGADAETVKKKAMEFLKYINAKLPGALELEYEGFYKRGFFVTKKKYAVIDEEGKITTRGLEIVRRDWSEIAKETQARVLEALLKDGDVEKAVRIVKEVTEKLSKYEVPPEKLVIHEQITRDLKDYKATGPHVAVAKRLAARGVKIRPGTVISYIVLKGSGRIGDRAIPFDEFDPTKHKYDAEYYIENQVLPAVERILRAFGYRKEDLRYQKTRQVGLSAWLKPKGT

SEQ ID NO: 2712 - protein, 774 aa, synthetic construct
MILDTDMITEDGKPVFRIFKKENGEFKIEYDRTFEPYFYALLKDDSAIEEVKKITAERHGTVVTVKRVEKVQKKFLGRPVEVWKLYFTHWQDVPAIRDKIREHPAVIDIYEYDIPFAKRYLIDKGLVPMEGDEELKMLAFDIETLYHEGEEFAEGPILMISYADEEGARVITWKNVDLPYVDVVSTEREMIKRFLRVVKEKDPDVLITYNGDNFDFAYLKKRCEKLGINFALGRDGSEPKIQRMGDRFAVEVKGRIHFDLYPVIRRTINLPTYTLEAVYEAVFGQPKEKVYAEEITTAWETGENLERVARYSMEDAKVTYELGKEFLPMEAQLSRLIGQSLWDVSRSSTGNLVEWFLLRKAYERNELAPNKPDEKELARRRQSYEGGYVKEPERGLWENIVYLDFRSLYPSIIITHNVSPDTLNREGCKEYDVAPQVGHRFCKDFPGFIPSLLGDLLEERQKIKKKMKATIDPIERKLLDYRQRAIKILANSYYGYYGYARARWYCKECAESVTAWGREYITMTIKEIEEKYGFKVIYSDTDGFFATIPGADAETVKKKAMEFLKYINAKLPGALELEYEGFYKRGFFVTKKKYAVIDEEGKITTRGLEIVRRDWSEIAKETQARVLEALLKDGDVEKAVRIVKEVTEKLSKYEVPPEKLVIHEQITRDLKDYKATGPHVAVAKRLAARGVKIRPGTVISYIVLKGSGRIGDRAIPFDEFDPTKHKYDAEYYIENQVLPAVERILRAFGYRKEDLRYQKTRQVGLSAWLKPKGT

SEQ ID NO: 2713 - protein, 774 aa, synthetic construct
MILDTDMITEDGKPVFRIFKKENGEFKIEYDRTFEPYFYALLKDDSAIEEVKKITAERHGTVVTVKRVEKVQKKFLGRPVEVWKLYFTHWQDVPAIADKIREHPAVIDIYEYDIPFAKRYLIDKGLVPMEGDEELKMLAFDIETLYHEGEEFAEGPILMISYADEEGARVITWKNVDLPYVDVVSTEREMIKRFLRVVKEKDPDVLITYNGDNFDFAYLKKRCEKLGINFALGRDGSEPKIQRMGDRFAVEVKGRIHFDLYPVIRRTINLPTYTLEAVYEAVFGQPKEKVYAEEITTAWETGENLERVARYSMEDAKVTYELGKEFLPMEAQLSRLIGQSLWDVSRSSTGNLVEWFLLRKAYERNELAPNKPDEKELARRRQSYEGGYVKEPERGLWENIVYLDFRSLYPSIIITHNVSPDTLNREGCKEYDVAPQVGHRFCKDFPGFIPSLLGDLLEERQKIKKKMKATIDPIERKLLDYRQRAIKILANSYYGYYGYARARWYCKECAESVTAWGREYITMTIKEIEEKYGFKVIYSDTDGFFATIPGADAETVKKKAMEFLKYINAKLPGALELEYEGFYKRGFFVTKKKYAVIDEEGKITTRGLEIVRRDWSEIAKETQARVLEALLKDGDVEKAVRIVKEVTEKLSKYEVPPEKLVIHEQITRDLKDYKATGPHVAVAKRLAARGVKIRPGTVISYIVLKGSGRIGDRAIPFDEFDPTKHKYDAEYYIENQVLPAVERILRAFGYRKEDLRYQKTRQVGLSAWLKPKGT

SEQ ID NO: 2714 - protein, 774 aa, synthetic construct
MILDTDMITEDGKPVFRIFKKENGEFKIEYDRTFEPYFYALLKDDSAIEEVKKITAERHGTVVTVKRVEKVQKKFLGRPVEVWKLYFTHWQDIPAIRDKIREHPAVIDIYEYDIPFAKRYLIDKGLVPMEGDEELKMLAFDIETLYHEGEEFAEGPILMISYADEEGARVITWKNVDLPYVDVVSTEREMIKRFLRVVKEKDPDVLITYNGDNFDFAYLKKRCEKLGINFALGRDGSEPKIQRMGDRFAVEVKGRIHFDLYPVIRRTINLPTYTLEAVYEAVFGQPKEKVYAEEITTAWETGENLERVARYSMEDAKVTYELGKEFLPMEAQLSRLIGQSLWDVSRSSTGNLVEWFLLRKAYERNELAPNKPDEKELARRRQSYEGGYVKEPERGLWENIVYLDFRSLYPSIIITHNVSPDTLNREGCKEYDVAPQVGHRFCKDFPGFIPSLLGDLLEERQKIKKKMKATIDPIERKLLDYRQRAIKILANSYYGYYGYARARWYCKECAESVTAWGREYITMTIKEIEEKYGFKVIYSDTDGFFATIPGADAETVKKKAMEFLKYINAKLPGALELEYEGFYKRGFFVTKKKYAVIDEEGKITTRGLEIVRRDWSEIAKETQARVLEALLKDGDVEKAVRIVKEVTEKLSKYEVPPEKLVIHEQITRDLKDYKATGPHVAVAKRLAARGVKIRPGTVISYIVLKGSGRIGDRAIPFDEFDPTKHKYDAEYYIENQVLPAVERILRAFGYRKEDLRYQKTRQVGLSAWLKPKGT

SEQ ID NO: 2715 - protein, 774 aa, synthetic construct
MILDTDMITEDGKPVFRIFKKENGEFKIEYDRTFEPYFYALLKDDSAIEEVKKITAERHGTVVTVKRVEKVQKKFLGRPVEVWKLYFTHWQDIPAIADKIREHPAVIDIYEYDIPFAKRYLIDKGLVPMEGDEELKMLAFDIETLYHEGEEFAEGPILMISYADEEGARVITWKNVDLPYVDVVSTEREMIKRFLRVVKEKDPDVLITYNGDNFDFAYLKKRCEKLGINFALGRDGSEPKIQRMGDRFAVEVKGRIHFDLYPVIRRTINLPTYTLEAVYEAVFGQPKEKVYAEEITTAWETGENLERVARYSMEDAKVTYELGKEFLPMEAQLSRLIGQSLWDVSRSSTGNLVEWFLLRKAYERNELAPNKPDEKELARRRQSYEGGYVKEPERGLWENIVYLDFRSLYPSIIITHNVSPDTLNREGCKEYDVAPQVGHRFCKDFPGFIPSLLGDLLEERQKIKKKMKATIDPIERKLLDYRQRAIKILANSYYGYYGYARARWYCKECAESVTAWGREYITMTIKEIEEKYGFKVIYSDTDGFFATIPGADAETVKKKAMEFLKYINAKLPGALELEYEGFYKRGFFVTKKKYAVIDEEGKITTRGLEIVRRDWSEIAKETQARVLEALLKDGDVEKAVRIVKEVTEKLSKYEVPPEKLVIHEQITRDLKDYKATGPHVAVAKRLAARGVKIRPGTVISYIVLKGSGRIGDRAIPFDEFDPTKHKYDAEYYIENQVLPAVERILRAFGYRKEDLRYQKTRQVGLSAWLKPKGT

SEQ ID NO: 2716 - protein, 774 aa, synthetic construct
MILDTDMITEDGKPVFRIFKKENGEFKIEYDRTFEPYFYALLKDDSAIEEVKKITAERHGTVVTVKRVEKVQKKFLGRPVEVWKLYFTHWQDIPAIFDKIREHPAVIDIYEYDIPFAKRYLIDKGLVPMEGDEELKMLAFDIETLYHEGEEFAEGPILMISYADEEGARVITWKNVDLPYVDVVSTEREMIKRFLRVVKEKDPDVLITYNGDNFDFAYLKKRCEKLGINFALGRDGSEPKIQRMGDRFAVEVKGRIHFDLYPVIRRTINLPTYTLEAVYEAVFGQPKEKVYAEEITTAWETGENLERVARYSMEDAKVTYELGKEFLPMEAQLSRLIGQSLWDVSRSSTGNLVEWFLLRKAYERNELAPNKPDEKELARRRQSYEGGYVKEPERGLWENIVYLDFRSLYPSIIITHNVSPDTLNREGCKEYDVAPQVGHRFCKDFPGFIPSLLGDLLEERQKIKKKMKATIDPIERKLLDYRQRAIKILANSYYGYYGYARARWYCKECAESVTAWGREYITMTIKEIEEKYGFKVIYSDTDGFFATIPGADAETVKKKAMEFLKYINAKLPGALELEYEGFYKRGFFVTKKKYAVIDEEGKITTRGLEIVRRDWSEIAKETQARVLEALLKDGDVEKAVRIVKEVTEKLSKYEVPPEKLVIHEQITRDLKDYKATGPHVAVAKRLAARGVKIRPGTVISYIVLKGSGRIGDRAIPFDEFDPTKHKYDAEYYIENQVLPAVERILRAFGYRKEDLRYQKTRQVGLSAWLKPKGT

SEQ ID NO: 2717 - protein, 774 aa, synthetic construct
MILDTDMITEDGKPVFRIFKKENGEFKIEYDRTFEPYFYALLKDDSAIEEVKKITAERHGTVVTVKRVEKVQKKFLGRPVEVWKLYFTHWQDIPAIHDKIREHPAVIDIYEYDIPFAKRYLIDKGLVPMEGDEELKMLAFDIETLYHEGEEFAEGPILMISYADEEGARVITWKNVDLPYVDVVSTEREMIKRFLRVVKEKDPDVLITYNGDNFDFAYLKKRCEKLGINFALGRDGSEPKIQRMGDRFAVEVKGRIHFDLYPVIRRTINLPTYTLEAVYEAVFGQPKEKVYAEEITTAWETGENLERVARYSMEDAKVTYELGKEFLPMEAQLSRLIGQSLWDVSRSSTGNLVEWFLLRKAYERNELAPNKPDEKELARRRQSYEGGYVKEPERGLWENIVYLDFRSLYPSIIITHNVSPDTLNREGCKEYDVAPQVGHRFCKDFPGFIPSLLGDLLEERQKIKKKMKATIDPIERKLLDYRQRAIKILANSYYGYYGYARARWYCKECAESVTAWGREYITMTIKEIEEKYGFKVIYSDTDGFFATIPGADAETVKKKAMEFLKYINAKLPGALELEYEGFYKRGFFVTKKKYAVIDEEGKITTRGLEIVRRDWSEIAKETQARVLEALLKDGDVEKAVRIVKEVTEKLSKYEVPPEKLVIHEQITRDLKDYKATGPHVAVAKRLAARGVKIRPGTVISYIVLKGSGRIGDRAIPFDEFDPTKHKYDAEYYIENQVLPAVERILRAFGYRKEDLRYQKTRQVGLSAWLKPKGT

SEQ ID NO: 2718 - protein, 774 aa, synthetic construct
MILDTDMITEDGKPVFRIFKKENGEFKIEYDRTFEPYFYALLKDDSAIEEVKKITAERHGTVVTVKRVEKVQKKFLGRPVEVWKLYFTHWQDQPAIRDKIREHPAVIDIYEYDIPFAKRYLIDKGLVPMEGDEELKMLAFDIETLYHEGEEFAEGPILMISYADEEGARVITWKNVDLPYVDVVSTEREMIKRFLRVVKEKDPDVLITYNGDNFDFAYLKKRCEKLGINFALGRDGSEPKIQRMGDRFAVEVKGRIHFDLYPVIRRTINLPTYTLEAVYEAVFGQPKEKVYAEEITTAWETGENLERVARYSMEDAKVTYELGKEFLPMEAQLSRLIGQSLWDVSRSSTGNLVEWFLLRKAYERNELAPNKPDEKELARRRQSYEGGYVKEPERGLWENIVYLDFRSLYPSIIITHNVSPDTLNREGCKEYDVAPQVGHRFCKDFPGFIPSLLGDLLEERQKIKKKMKATIDPIERKLLDYRQRAIKILANSYYGYYGYARARWYCKECAESVTAWGREYITMTIKEIEEKYGFKVIYSDTDGFFATIPGADAETVKKKAMEFLKYINAKLPGALELEYEGFYKRGFFVTKKKYAVIDEEGKITTRGLEIVRRDWSEIAKETQARVLEALLKDGDVEKAVRIVKEVTEKLSKYEVPPEKLVIHEQITRDLKDYKATGPHVAVAKRLAARGVKIRPGTVISYIVLKGSGRIGDRAIPFDEFDPTKHKYDAEYYIENQVLPAVERILRAFGYRKEDLRYQKTRQVGLSAWLKPKGT

SEQ ID NO: 2719 - protein, 774 aa, synthetic construct
MILDTDMITEDGKPVFRIFKKENGEFKIEYDRTFEPYFYALLKDDSAIEEVKKITAERHGTVVTVKRVEKVQKKFLGRPVEVWKLYFTHWQDRPAIADKIREHPAVIDIYEYDIPFAKRYLIDKGLVPMEGDEELKMLAFDIETLYHEGEEFAEGPILMISYADEEGARVITWKNVDLPYVDVVSTEREMIKRFLRVVKEKDPDVLITYNGDNFDFAYLKKRCEKLGINFALGRDGSEPKIQRMGDRFAVEVKGRIHFDLYPVIRRTINLPTYTLEAVYEAVFGQPKEKVYAEEITTAWETGENLERVARYSMEDAKVTYELGKEFLPMEAQLSRLIGQSLWDVSRSSTGNLVEWFLLRKAYERNELAPNKPDEKELARRRQSYEGGYVKEPERGLWENIVYLDFRSLYPSIIITHNVSPDTLNREGCKEYDVAPQVGHRFCKDFPGFIPSLLGDLLEERQKIKKKMKATIDPIERKLLDYRQRAIKILANSYYGYYGYARARWYCKECAESVTAWGREYITMTIKEIEEKYGFKVIYSDTDGFFATIPGADAETVKKKAMEFLKYINAKLPGALELEYEGFYKRGFFVTKKKYAVIDEEGKITTRGLEIVRRDWSEIAKETQARVLEALLKDGDVEKAVRIVKEVTEKLSKYEVPPEKLVIHEQITRDLKDYKATGPHVAVAKRLAARGVKIRPGTVISYIVLKGSGRIGDRAIPFDEFDPTKHKYDAEYYIENQVLPAVERILRAFGYRKEDLRYQKTRQVGLSAWLKPKGT

SEQ ID NO: 2720 - protein, 774 aa, synthetic construct
MILDTDMITEDGKPVFRIFKKENGEFKIEYDRTFEPYFYALLKDDSAIEEVKKITAERHGTVVTVKRVEKVQKKFLGRPVEVWKLYFTHWQDRPAIWDKIREHPAVIDIYEYDIPFAKRYLIDKGLVPMEGDEELKMLAFDIETLYHEGEEFAEGPILMISYADEEGARVITWKNVDLPYVDVVSTEREMIKRFLRVVKEKDPDVLITYNGDNFDFAYLKKRCEKLGINFALGRDGSEPKIQRMGDRFAVEVKGRIHFDLYPVIRRTINLPTYTLEAVYEAVFGQPKEKVYAEEITTAWETGENLERVARYSMEDAKVTYELGKEFLPMEAQLSRLIGQSLWDVSRSSTGNLVEWFLLRKAYERNELAPNKPDEKELARRRQSYEGGYVKEPERGLWENIVYLDFRSLYPSIIITHNVSPDTLNREGCKEYDVAPQVGHRFCKDFPGFIPSLLGDLLEERQKIKKKMKATIDPIERKLLDYRQRAIKILANSYYGYYGYARARWYCKECAESVTAWGREYITMTIKEIEEKYGFKVIYSDTDGFFATIPGADAETVKKKAMEFLKYINAKLPGALELEYEGFYKRGFFVTKKKYAVIDEEGKITTRGLEIVRRDWSEIAKETQARVLEALLKDGDVEKAVRIVKEVTEKLSKYEVPPEKLVIHEQITRDLKDYKATGPHVAVAKRLAARGVKIRPGTVISYIVLKGSGRIGDRAIPFDEFDPTKHKYDAEYYIENQVLPAVERILRAFGYRKEDLRYQKTRQVGLSAWLKPKGT

SEQ ID NO: 2721 - protein, 774 aa, synthetic construct
MILDTDMITEDGKPVFRIFKKENGEFKIEYDRTFEPYFYALLKDDSAIEEVKKITAERHGTVVTVKRVEKVQKKFLGRPVEVWKLYFTHYQDVPAIRDKIREHPAVIDIYEYDIPFAKRYLIDKGLVPMEGDEELKMLAFDIETLYHEGEEFAEGPILMISYADEEGARVITWKNVDLPYVDVVSTEREMIKRFLRVVKEKDPDVLITYNGDNFDFAYLKKRCEKLGINFALGRDGSEPKIQRMGDRFAVEVKGRIHFDLYPVIRRTINLPTYTLEAVYEAVFGQPKEKVYAEEITTAWETGENLERVARYSMEDAKVTYELGKEFLPMEAQLSRLIGQSLWDVSRSSTGNLVEWFLLRKAYERNELAPNKPDEKELARRRQSYEGGYVKEPERGLWENIVYLDFRSLYPSIIITHNVSPDTLNREGCKEYDVAPQVGHRFCKDFPGFIPSLLGDLLEERQKIKKKMKATIDPIERKLLDYRQRAIKILANSYYGYYGYARARWYCKECAESVTAWGREYITMTIKEIEEKYGFKVIYSDTDGFFATIPGADAETVKKKAMEFLKYINAKLPGALELEYEGFYKRGFFVTKKKYAVIDEEGKITTRGLEIVRRDWSEIAKETQARVLEALLKDGDVEKAVRIVKEVTEKLSKYEVPPEKLVIHEQITRDLKDYKATGPHVAVAKRLAARGVKIRPGTVISYIVLKGSGRIGDRAIPFDEFDPTKHKYDAEYYIENQVLPAVERILRAFGYRKEDLRYQKTRQVGLSAWLKPKGT

SEQ ID NO: 2722 - protein, 774 aa, synthetic construct
MILDTDMITEDGKPVFRIFKKENGEFKIEYDRTFEPYFYALLKDDSAIEEVKKITAERHGTVVTVKRVEKVQKKFLGRPVEVWKLYFTHYQDVPAIADKIREHPAVIDIYEYDIPFAKRYLIDKGLVPMEGDEELKMLAFDIETLYHEGEEFAEGPILMISYADEEGARVITWKNVDLPYVDVVSTEREMIKRFLRVVKEKDPDVLITYNGDNFDFAYLKKRCEKLGINFALGRDGSEPKIQRMGDRFAVEVKGRIHFDLYPVIRRTINLPTYTLEAVYEAVFGQPKEKVYAEEITTAWETGENLERVARYSMEDAKVTYELGKEFLPMEAQLSRLIGQSLWDVSRSSTGNLVEWFLLRKAYERNELAPNKPDEKELARRRQSYEGGYVKEPERGLWENIVYLDFRSLYPSIIITHNVSPDTLNREGCKEYDVAPQVGHRFCKDFPGFIPSLLGDLLEERQKIKKKMKATIDPIERKLLDYRQRAIKILANSYYGYYGYARARWYCKECAESVTAWGREYITMTIKEIEEKYGFKVIYSDTDGFFATIPGADAETVKKKAMEFLKYINAKLPGALELEYEGFYKRGFFVTKKKYAVIDEEGKITTRGLEIVRRDWSEIAKETQARVLEALLKDGDVEKAVRIVKEVTEKLSKYEVPPEKLVIHEQITRDLKDYKATGPHVAVAKRLAARGVKIRPGTVISYIVLKGSGRIGDRAIPFDEFDPTKHKYDAEYYIENQVLPAVERILRAFGYRKEDLRYQKTRQVGLSAWLKPKGT

SEQ ID NO: 2723 - protein, 774 aa, synthetic construct
MILDTDMITEDGKPVFRIFKKENGEFKIEYDRTFEPYFYALLKDDSAIEEVKKITAERHGTVVTVKRVEKVQKKFLGRPVEVWKLYFTHYQDVPAIHDKIREHPAVIDIYEYDIPFAKRYLIDKGLVPMEGDEELKMLAFDIETLYHEGEEFAEGPILMISYADEEGARVITWKNVDLPYVDVVSTEREMIKRFLRVVKEKDPDVLITYNGDNFDFAYLKKRCEKLGINFALGRDGSEPKIQRMGDRFAVEVKGRIHFDLYPVIRRTINLPTYTLEAVYEAVFGQPKEKVYAEEITTAWETGENLERVARYSMEDAKVTYELGKEFLPMEAQLSRLIGQSLWDVSRSSTGNLVEWFLLRKAYERNELAPNKPDEKELARRRQSYEGGYVKEPERGLWENIVYLDFRSLYPSIIITHNVSPDTLNREGCKEYDVAPQVGHRFCKDFPGFIPSLLGDLLEERQKIKKKMKATIDPIERKLLDYRQRAIKILANSYYGYYGYARARWYCKECAESVTAWGREYITMTIKEIEEKYGFKVIYSDTDGFFATIPGADAETVKKKAMEFLKYINAKLPGALELEYEGFYKRGFFVTKKKYAVIDEEGKITTRGLEIVRRDWSEIAKETQARVLEALLKDGDVEKAVRIVKEVTEKLSKYEVPPEKLVIHEQITRDLKDYKATGPHVAVAKRLAARGVKIRPGTVISYIVLKGSGRIGDRAIPFDEFDPTKHKYDAEYYIENQVLPAVERILRAFGYRKEDLRYQKTRQVGLSAWLKPKGT

SEQ ID NO: 2724 - protein, 774 aa, synthetic construct
MILDTDMITEDGKPVFRIFKKENGEFKIEYDRTFEPYFYALLKDDSAIEEVKKITAERHGTVVTVKRVEKVQKKFLGRPVEVWKLYFTHYQDIPAIRDKIREHPAVIDIYEYDIPFAKRYLIDKGLVPMEGDEELKMLAFDIETLYHEGEEFAEGPILMISYADEEGARVITWKNVDLPYVDVVSTEREMIKRFLRVVKEKDPDVLITYNGDNFDFAYLKKRCEKLGINFALGRDGSEPKIQRMGDRFAVEVKGRIHFDLYPVIRRTINLPTYTLEAVYEAVFGQPKEKVYAEEITTAWETGENLERVARYSMEDAKVTYELGKEFLPMEAQLSRLIGQSLWDVSRSSTGNLVEWFLLRKAYERNELAPNKPDEKELARRRQSYEGGYVKEPERGLWENIVYLDFRSLYPSIIITHNVSPDTLNREGCKEYDVAPQVGHRFCKDFPGFIPSLLGDLLEERQKIKKKMKATIDPIERKLLDYRQRAIKILANSYYGYYGYARARWYCKECAESVTAWGREYITMTIKEIEEKYGFKVIYSDTDGFFATIPGADAETVKKKAMEFLKYINAKLPGALELEYEGFYKRGFFVTKKKYAVIDEEGKITTRGLEIVRRDWSEIAKETQARVLEALLKDGDVEKAVRIVKEVTEKLSKYEVPPEKLVIHEQITRDLKDYKATGPHVAVAKRLAARGVKIRPGTVISYIVLKGSGRIGDRAIPFDEFDPTKHKYDAEYYIENQVLPAVERILRAFGYRKEDLRYQKTRQVGLSAWLKPKGT

SEQ ID NO: 2725 - protein, 774 aa, synthetic construct
MILDTDMITEDGKPVFRIFKKENGEFKIEYDRTFEPYFYALLKDDSAIEEVKKITAERHGTVVTVKRVEKVQKKFLGRPVEVWKLYFTHYQDIPAIADKIREHPAVIDIYEYDIPFAKRYLIDKGLVPMEGDEELKMLAFDIETLYHEGEEFAEGPILMISYADEEGARVITWKNVDLPYVDVVSTEREMIKRFLRVVKEKDPDVLITYNGDNFDFAYLKKRCEKLGINFALGRDGSEPKIQRMGDRFAVEVKGRIHFDLYPVIRRTINLPTYTLEAVYEAVFGQPKEKVYAEEITTAWETGENLERVARYSMEDAKVTYELGKEFLPMEAQLSRLIGQSLWDVSRSSTGNLVEWFLLRKAYERNELAPNKPDEKELARRRQSYEGGYVKEPERGLWENIVYLDFRSLYPSIIITHNVSPDTLNREGCKEYDVAPQVGHRFCKDFPGFIPSLLGDLLEERQKIKKKMKATIDPIERKLLDYRQRAIKILANSYYGYYGYARARWYCKECAESVTAWGREYITMTIKEIEEKYGFKVIYSDTDGFFATIPGADAETVKKKAMEFLKYINAKLPGALELEYEGFYKRGFFVTKKKYAVIDEEGKITTRGLEIVRRDWSEIAKETQARVLEALLKDGDVEKAVRIVKEVTEKLSKYEVPPEKLVIHEQITRDLKDYKATGPHVAVAKRLAARGVKIRPGTVISYIVLKGSGRIGDRAIPFDEFDPTKHKYDAEYYIENQVLPAVERILRAFGYRKEDLRYQKTRQVGLSAWLKPKGT

SEQ ID NO: 2726 - protein, 774 aa, synthetic construct
MILDTDMITEDGKPVFRIFKKENGEFKIEYDRTFEPYFYALLKDDSAIEEVKKITAERHGTVVTVKRVEKVQKKFLGRPVEVWKLYFTHYQDIPAIFDKIREHPAVIDIYEYDIPFAKRYLIDKGLVPMEGDEELKMLAFDIETLYHEGEEFAEGPILMISYADEEGARVITWKNVDLPYVDVVSTEREMIKRFLRVVKEKDPDVLITYNGDNFDFAYLKKRCEKLGINFALGRDGSEPKIQRMGDRFAVEVKGRIHFDLYPVIRRTINLPTYTLEAVYEAVFGQPKEKVYAEEITTAWETGENLERVARYSMEDAKVTYELGKEFLPMEAQLSRLIGQSLWDVSRSSTGNLVEWFLLRKAYERNELAPNKPDEKELARRRQSYEGGYVKEPERGLWENIVYLDFRSLYPSIIITHNVSPDTLNREGCKEYDVAPQVGHRFCKDFPGFIPSLLGDLLEERQKIKKKMKATIDPIERKLLDYRQRAIKILANSYYGYYGYARARWYCKECAESVTAWGREYITMTIKEIEEKYGFKVIYSDTDGFFATIPGADAETVKKKAMEFLKYINAKLPGALELEYEGFYKRGFFVTKKKYAVIDEEGKITTRGLEIVRRDWSEIAKETQARVLEALLKDGDVEKAVRIVKEVTEKLSKYEVPPEKLVIHEQITRDLKDYKATGPHVAVAKRLAARGVKIRPGTVISYIVLKGSGRIGDRAIPFDEFDPTKHKYDAEYYIENQVLPAVERILRAFGYRKEDLRYQKTRQVGLSAWLKPKGT

SEQ ID NO: 2727 - protein, 774 aa, synthetic construct
MILDTDMITEDGKPVFRIFKKENGEFKIEYDRTFEPYFYALLKDDSAIEEVKKITAERHGTVVTVKRVEKVQKKFLGRPVEVWKLYFTHYQDIPAIHDKIREHPAVIDIYEYDIPFAKRYLIDKGLVPMEGDEELKMLAFDIETLYHEGEEFAEGPILMISYADEEGARVITWKNVDLPYVDVVSTEREMIKRFLRVVKEKDPDVLITYNGDNFDFAYLKKRCEKLGINFALGRDGSEPKIQRMGDRFAVEVKGRIHFDLYPVIRRTINLPTYTLEAVYEAVFGQPKEKVYAEEITTAWETGENLERVARYSMEDAKVTYELGKEFLPMEAQLSRLIGQSLWDVSRSSTGNLVEWFLLRKAYERNELAPNKPDEKELARRRQSYEGGYVKEPERGLWENIVYLDFRSLYPSIIITHNVSPDTLNREGCKEYDVAPQVGHRFCKDFPGFIPSLLGDLLEERQKIKKKMKATIDPIERKLLDYRQRAIKILANSYYGYYGYARARWYCKECAESVTAWGREYITMTIKEIEEKYGFKVIYSDTDGFFATIPGADAETVKKKAMEFLKYINAKLPGALELEYEGFYKRGFFVTKKKYAVIDEEGKITTRGLEIVRRDWSEIAKETQARVLEALLKDGDVEKAVRIVKEVTEKLSKYEVPPEKLVIHEQITRDLKDYKATGPHVAVAKRLAARGVKIRPGTVISYIVLKGSGRIGDRAIPFDEFDPTKHKYDAEYYIENQVLPAVERILRAFGYRKEDLRYQKTRQVGLSAWLKPKGT

SEQ ID NO: 2728 - protein, 774 aa, synthetic construct
MILDTDMITEDGKPVFRIFKKENGEFKIEYDRTFEPYFYALLKDDSAIEEVKKITAERHGTVVTVKRVEKVQKKFLGRPVEVWKLYFTHYQDIPAIWDKIREHPAVIDIYEYDIPFAKRYLIDKGLVPMEGDEELKMLAFDIETLYHEGEEFAEGPILMISYADEEGARVITWKNVDLPYVDVVSTEREMIKRFLRVVKEKDPDVLITYNGDNFDFAYLKKRCEKLGINFALGRDGSEPKIQRMGDRFAVEVKGRIHFDLYPVIRRTINLPTYTLEAVYEAVFGQPKEKVYAEEITTAWETGENLERVARYSMEDAKVTYELGKEFLPMEAQLSRLIGQSLWDVSRSSTGNLVEWFLLRKAYERNELAPNKPDEKELARRRQSYEGGYVKEPERGLWENIVYLDFRSLYPSIIITHNVSPDTLNREGCKEYDVAPQVGHRFCKDFPGFIPSLLGDLLEERQKIKKKMKATIDPIERKLLDYRQRAIKILANSYYGYYGYARARWYCKECAESVTAWGREYITMTIKEIEEKYGFKVIYSDTDGFFATIPGADAETVKKKAMEFLKYINAKLPGALELEYEGFYKRGFFVTKKKYAVIDEEGKITTRGLEIVRRDWSEIAKETQARVLEALLKDGDVEKAVRIVKEVTEKLSKYEVPPEKLVIHEQITRDLKDYKATGPHVAVAKRLAARGVKIRPGTVISYIVLKGSGRIGDRAIPFDEFDPTKHKYDAEYYIENQVLPAVERILRAFGYRKEDLRYQKTRQVGLSAWLKPKGT

SEQ ID NO: 2729 - protein, 774 aa, synthetic construct
MILDTDMITEDGKPVFRIFKKENGEFKIEYDRTFEPYFYALLKDDSAIEEVKKITAERHGTVVTVKRVEKVQKKFLGRPVEVWKLYFTHPQDVPAIADKIREHPAVIDIYEYDIPFAKRYLIDKGLVPMEGDEELKMLAFDIETLYHEGEEFAEGPILMISYADEEGARVITWKNVDLPYVDVVSTEREMIKRFLRVVKEKDPDVLITYNGDNFDFAYLKKRCEKLGINFALGRDGSEPKIQRMGDRFAVEVKGRIHFDLYPVIRRTINLPTYTLEAVYEAVFGQPKEKVYAEEITTAWETGENLERVARYSMEDAKVTYELGKEFLPMEAQLSRLIGQSLWDVSRSSTGNLVEWFLLRKAYERNELAPNKPDEKELARRRQSYEGGYVKEPERGLWENIVYLDFRSLYPSIIITHNVSPDTLNREGCKEYDVAPQVGHRFCKDFPGFIPSLLGDLLEERQKIKKKMKATIDPIERKLLDYRQRAIKILANSYYGYYGYARARWYCKECAESVTAWGREYITMTIKEIEEKYGFKVIYSDTDGFFATIPGADAETVKKKAMEFLKYINAKLPGALELEYEGFYKRGFFVTKKKYAVIDEEGKITTRGLEIVRRDWSEIAKETQARVLEALLKDGDVEKAVRIVKEVTEKLSKYEVPPEKLVIHEQITRDLKDYKATGPHVAVAKRLAARGVKIRPGTVISYIVLKGSGRIGDRAIPFDEFDPTKHKYDAEYYIENQVLPAVERILRAFGYRKEDLRYQKTRQVGLSAWLKPKGT

SEQ ID NO: 2730 - protein, 774 aa, synthetic construct
MILDTDMITEDGKPVFRIFKKENGEFKIEYDRTFEPYFYALLKDDSAIEEVKKITAERHGTVVTVKRVEKVQKKFLGRPVEVWKLYFTHPQDVPAIFDKIREHPAVIDIYEYDIPFAKRYLIDKGLVPMEGDEELKMLAFDIETLYHEGEEFAEGPILMISYADEEGARVITWKNVDLPYVDVVSTEREMIKRFLRVVKEKDPDVLITYNGDNFDFAYLKKRCEKLGINFALGRDGSEPKIQRMGDRFAVEVKGRIHFDLYPVIRRTINLPTYTLEAVYEAVFGQPKEKVYAEEITTAWETGENLERVARYSMEDAKVTYELGKEFLPMEAQLSRLIGQSLWDVSRSSTGNLVEWFLLRKAYERNELAPNKPDEKELARRRQSYEGGYVKEPERGLWENIVYLDFRSLYPSIIITHNVSPDTLNREGCKEYDVAPQVGHRFCKDFPGFIPSLLGDLLEERQKIKKKMKATIDPIERKLLDYRQRAIKILANSYYGYYGYARARWYCKECAESVTAWGREYITMTIKEIEEKYGFKVIYSDTDGFFATIPGADAETVKKKAMEFLKYINAKLPGALELEYEGFYKRGFFVTKKKYAVIDEEGKITTRGLEIVRRDWSEIAKETQARVLEALLKDGDVEKAVRIVKEVTEKLSKYEVPPEKLVIHEQITRDLKDYKATGPHVAVAKRLAARGVKIRPGTVISYIVLKGSGRIGDRAIPFDEFDPTKHKYDAEYYIENQVLPAVERILRAFGYRKEDLRYQKTRQVGLSAWLKPKGT

SEQ ID NO: 2731 - protein, 774 aa, synthetic construct
MILDTDMITEDGKPVFRIFKKENGEFKIEYDRTFEPYFYALLKDDSAIEEVKKITAERHGTVVTVKRVEKVQKKFLGRPVEVWKLYFTHPQDVPAIHDKIREHPAVIDIYEYDIPFAKRYLIDKGLVPMEGDEELKMLAFDIETLYHEGEEFAEGPILMISYADEEGARVITWKNVDLPYVDVVSTEREMIKRFLRVVKEKDPDVLITYNGDNFDFAYLKKRCEKLGINFALGRDGSEPKIQRMGDRFAVEVKGRIHFDLYPVIRRTINLPTYTLEAVYEAVFGQPKEKVYAEEITTAWETGENLERVARYSMEDAKVTYELGKEFLPMEAQLSRLIGQSLWDVSRSSTGNLVEWFLLRKAYERNELAPNKPDEKELARRRQSYEGGYVKEPERGLWENIVYLDFRSLYPSIIITHNVSPDTLNREGCKEYDVAPQVGHRFCKDFPGFIPSLLGDLLEERQKIKKKMKATIDPIERKLLDYRQRAIKILANSYYGYYGYARARWYCKECAESVTAWGREYITMTIKEIEEKYGFKVIYSDTDGFFATIPGADAETVKKKAMEFLKYINAKLPGALELEYEGFYKRGFFVTKKKYAVIDEEGKITTRGLEIVRRDWSEIAKETQARVLEALLKDGDVEKAVRIVKEVTEKLSKYEVPPEKLVIHEQITRDLKDYKATGPHVAVAKRLAARGVKIRPGTVISYIVLKGSGRIGDRAIPFDEFDPTKHKYDAEYYIENQVLPAVERILRAFGYRKEDLRYQKTRQVGLSAWLKPKGT

SEQ ID NO: 2732 - protein, 774 aa, synthetic construct
MILDTDMITEDGKPVFRIFKKENGEFKIEYDRTFEPYFYALLKDDSAIEEVKKITAERHGTVVTVKRVEKVQKKFLGRPVEVWKLYFTHPQDVPAIWDKIREHPAVIDIYEYDIPFAKRYLIDKGLVPMEGDEELKMLAFDIETLYHEGEEFAEGPILMISYADEEGARVITWKNVDLPYVDVVSTEREMIKRFLRVVKEKDPDVLITYNGDNFDFAYLKKRCEKLGINFALGRDGSEPKIQRMGDRFAVEVKGRIHFDLYPVIRRTINLPTYTLEAVYEAVFGQPKEKVYAEEITTAWETGENLERVARYSMEDAKVTYELGKEFLPMEAQLSRLIGQSLWDVSRSSTGNLVEWFLLRKAYERNELAPNKPDEKELARRRQSYEGGYVKEPERGLWENIVYLDFRSLYPSIIITHNVSPDTLNREGCKEYDVAPQVGHRFCKDFPGFIPSLLGDLLEERQKIKKKMKATIDPIERKLLDYRQRAIKILANSYYGYYGYARARWYCKECAESVTAWGREYITMTIKEIEEKYGFKVIYSDTDGFFATIPGADAETVKKKAMEFLKYINAKLPGALELEYEGFYKRGFFVTKKKYAVIDEEGKITTRGLEIVRRDWSEIAKETQARVLEALLKDGDVEKAVRIVKEVTEKLSKYEVPPEKLVIHEQITRDLKDYKATGPHVAVAKRLAARGVKIRPGTVISYIVLKGSGRIGDRAIPFDEFDPTKHKYDAEYYIENQVLPAVERILRAFGYRKEDLRYQKTRQVGLSAWLKPKGT

SEQ ID NO: 2733 - protein, 774 aa, synthetic construct
MILDTDMITEDGKPVFRIFKKENGEFKIEYDRTFEPYFYALLKDDSAIEEVKKITAERHGTVVTVKRVEKVQKKFLGRPVEVWKLYFTHPQDVPAIRDKIREHPAVIDIYEYDIPFAKQYLIDKGLVPMEGDEELKMLAFDIETLYHEGEEFAEGPILMISYADEEGARVITWKNVDLPYVDVVSTEREMIKRFLRVVKEKDPDVLITYNGDNFDFAYLKKRCEKLGINFALGRDGSEPKIQRMGDRFAVEVKGRIHFDLYPVIRRTINLPTYTLEAVYEAVFGQPKEKVYAEEITTAWETGENLERVARYSMEDAKVTYELGKEFLPMEAQLSRLIGQSLWDVSRSSTGNLVEWFLLRKAYERNELAPNKPDEKELARRRQSYEGGYVKEPERGLWENIVYLDFRSLYPSIIITHNVSPDTLNREGCKEYDVAPQVGHRFCKDFPGFIPSLLGDLLEERQKIKKKMKATIDPIERKLLDYRQRAIKILANSYYGYYGYARARWYCKECAESVTAWGREYITMTIKEIEEKYGFKVIYSDTDGFFATIPGADAETVKKKAMEFLKYINAKLPGALELEYEGFYKRGFFVTKKKYAVIDEEGKITTRGLEIVRRDWSEIAKETQARVLEALLKDGDVEKAVRIVKEVTEKLSKYEVPPEKLVIHEQITRDLKDYKATGPHVAVAKRLAARGVKIRPGTVISYIVLKGSGRIGDRAIPFDEFDPTKHKYDAEYYIENQVLPAVERILRAFGYRKEDLRYQKTRQVGLSAWLKPKGT

SEQ ID NO: 2734 - protein, 774 aa, synthetic construct
MILDTDMITEDGKPVFRIFKKENGEFKIEYDRTFEPYFYALLKDDSAIEEVKKITAERHGTVVTVKRVEKVQKKFLGRPVEVWKLYFTHPQDIPAIRDKIREHPAVIDIYEYDIPFAKRYLIDKGLVPMEGDEELKMLAFDIETLYHEGEEFAEGPILMISYADEEGARVITWKNVDLPYVDVVSTEREMIKRFLRVVKEKDPDVLITYNGDNFDFAYLKKRCEKLGINFALGRDGSEPKIQRMGDRFAVEVKGRIHFDLYPVIRRTINLPTYTLEAVYEAVFGQPKEKVYAEEITTAWETGENLERVARYSMEDAKVTYELGKEFLPMEAQLSRLIGQSLWDVSRSSTGNLVEWFLLRKAYERNELAPNKPDEKELARRRQSYEGGYVKEPERGLWENIVYLDFRSLYPSIIITHNVSPDTLNREGCKEYDVAPQVGHRFCKDFPGFIPSLLGDLLEERQKIKKKMKATIDPIERKLLDYRQRAIKILANSYYGYYGYARARWYCKECAESVTAWGREYITMTIKEIEEKYGFKVIYSDTDGFFATIPGADAETVKKKAMEFLKYINAKLPGALELEYEGFYKRGFFVTKKKYAVIDEEGKITTRGLEIVRRDWSEIAKETQARVLEALLKDGDVEKAVRIVKEVTEKLSKYEVPPEKLVIHEQITRDLKDYKATGPHVAVAKRLAARGVKIRPGTVISYIVLKGSGRIGDRAIPFDEFDPTKHKYDAEYYIENQVLPAVERILRAFGYRKEDLRYQKTRQVGLSAWLKPKGT

SEQ ID NO: 2735 - protein, 774 aa, synthetic construct
MILDTDMITEDGKPVFRIFKKENGEFKIEYDRTFEPYFYALLKDDSAIEEVKKITAERHGTVVTVKRVEKVQKKFLGRPVEVWKLYFTHPQDIPAIADKIREHPAVIDIYEYDIPFAKRYLIDKGLVPMEGDEELKMLAFDIETLYHEGEEFAEGPILMISYADEEGARVITWKNVDLPYVDVVSTEREMIKRFLRVVKEKDPDVLITYNGDNFDFAYLKKRCEKLGINFALGRDGSEPKIQRMGDRFAVEVKGRIHFDLYPVIRRTINLPTYTLEAVYEAVFGQPKEKVYAEEITTAWETGENLERVARYSMEDAKVTYELGKEFLPMEAQLSRLIGQSLWDVSRSSTGNLVEWFLLRKAYERNELAPNKPDEKELARRRQSYEGGYVKEPERGLWENIVYLDFRSLYPSIIITHNVSPDTLNREGCKEYDVAPQVGHRFCKDFPGFIPSLLGDLLEERQKIKKKMKATIDPIERKLLDYRQRAIKILANSYYGYYGYARARWYCKECAESVTAWGREYITMTIKEIEEKYGFKVIYSDTDGFFATIPGADAETVKKKAMEFLKYINAKLPGALELEYEGFYKRGFFVTKKKYAVIDEEGKITTRGLEIVRRDWSEIAKETQARVLEALLKDGDVEKAVRIVKEVTEKLSKYEVPPEKLVIHEQITRDLKDYKATGPHVAVAKRLAARGVKIRPGTVISYIVLKGSGRIGDRAIPFDEFDPTKHKYDAEYYIENQVLPAVERILRAFGYRKEDLRYQKTRQVGLSAWLKPKGT

SEQ ID NO: 2736 - protein, 774 aa, synthetic construct
MILDTDMITEDGKPVFRIFKKENGEFKIEYDRTFEPYFYALLKDDSAIEEVKKITAERHGTVVTVKRVEKVQKKFLGRPVEVWKLYFTHPQDIPAIFDKIREHPAVIDIYEYDIPFAKRYLIDKGLVPMEGDEELKMLAFDIETLYHEGEEFAEGPILMISYADEEGARVITWKNVDLPYVDVVSTEREMIKRFLRVVKEKDPDVLITYNGDNFDFAYLKKRCEKLGINFALGRDGSEPKIQRMGDRFAVEVKGRIHFDLYPVIRRTINLPTYTLEAVYEAVFGQPKEKVYAEEITTAWETGENLERVARYSMEDAKVTYELGKEFLPMEAQLSRLIGQSLWDVSRSSTGNLVEWFLLRKAYERNELAPNKPDEKELARRRQSYEGGYVKEPERGLWENIVYLDFRSLYPSIIITHNVSPDTLNREGCKEYDVAPQVGHRFCKDFPGFIPSLLGDLLEERQKIKKKMKATIDPIERKLLDYRQRAIKILANSYYGYYGYARARWYCKECAESVTAWGREYITMTIKEIEEKYGFKVIYSDTDGFFATIPGADAETVKKKAMEFLKYINAKLPGALELEYEGFYKRGFFVTKKKYAVIDEEGKITTRGLEIVRRDWSEIAKETQARVLEALLKDGDVEKAVRIVKEVTEKLSKYEVPPEKLVIHEQITRDLKDYKATGPHVAVAKRLAARGVKIRPGTVISYIVLKGSGRIGDRAIPFDEFDPTKHKYDAEYYIENQVLPAVERILRAFGYRKEDLRYQKTRQVGLSAWLKPKGT

SEQ ID NO: 2737 - protein, 774 aa, synthetic construct
MILDTDMITEDGKPVFRIFKKENGEFKIEYDRTFEPYFYALLKDDSAIEEVKKITAERHGTVVTVKRVEKVQKKFLGRPVEVWKLYFTHPQDIPAIHDKIREHPAVIDIYEYDIPFAKRYLIDKGLVPMEGDEELKMLAFDIETLYHEGEEFAEGPILMISYADEEGARVITWKNVDLPYVDVVSTEREMIKRFLRVVKEKDPDVLITYNGDNFDFAYLKKRCEKLGINFALGRDGSEPKIQRMGDRFAVEVKGRIHFDLYPVIRRTINLPTYTLEAVYEAVFGQPKEKVYAEEITTAWETGENLERVARYSMEDAKVTYELGKEFLPMEAQLSRLIGQSLWDVSRSSTGNLVEWFLLRKAYERNELAPNKPDEKELARRRQSYEGGYVKEPERGLWENIVYLDFRSLYPSIIITHNVSPDTLNREGCKEYDVAPQVGHRFCKDFPGFIPSLLGDLLEERQKIKKKMKATIDPIERKLLDYRQRAIKILANSYYGYYGYARARWYCKECAESVTAWGREYITMTIKEIEEKYGFKVIYSDTDGFFATIPGADAETVKKKAMEFLKYINAKLPGALELEYEGFYKRGFFVTKKKYAVIDEEGKITTRGLEIVRRDWSEIAKETQARVLEALLKDGDVEKAVRIVKEVTEKLSKYEVPPEKLVIHEQITRDLKDYKATGPHVAVAKRLAARGVKIRPGTVISYIVLKGSGRIGDRAIPFDEFDPTKHKYDAEYYIENQVLPAVERILRAFGYRKEDLRYQKTRQVGLSAWLKPKGT

SEQ ID NO: 2738 - protein, 774 aa, synthetic construct
MILDTDMITEDGKPVFRIFKKENGEFKIEYDRTFEPYFYALLKDDSAIEEVKKITAERHGTVVTVKRVEKVQKKFLGRPVEVWKLYFTHPQDIPAIWDKIREHPAVIDIYEYDIPFAKRYLIDKGLVPMEGDEELKMLAFDIETLYHEGEEFAEGPILMISYADEEGARVITWKNVDLPYVDVVSTEREMIKRFLRVVKEKDPDVLITYNGDNFDFAYLKKRCEKLGINFALGRDGSEPKIQRMGDRFAVEVKGRIHFDLYPVIRRTINLPTYTLEAVYEAVFGQPKEKVYAEEITTAWETGENLERVARYSMEDAKVTYELGKEFLPMEAQLSRLIGQSLWDVSRSSTGNLVEWFLLRKAYERNELAPNKPDEKELARRRQSYEGGYVKEPERGLWENIVYLDFRSLYPSIIITHNVSPDTLNREGCKEYDVAPQVGHRFCKDFPGFIPSLLGDLLEERQKIKKKMKATIDPIERKLLDYRQRAIKILANSYYGYYGYARARWYCKECAESVTAWGREYITMTIKEIEEKYGFKVIYSDTDGFFATIPGADAETVKKKAMEFLKYINAKLPGALELEYEGFYKRGFFVTKKKYAVIDEEGKITTRGLEIVRRDWSEIAKETQARVLEALLKDGDVEKAVRIVKEVTEKLSKYEVPPEKLVIHEQITRDLKDYKATGPHVAVAKRLAARGVKIRPGTVISYIVLKGSGRIGDRAIPFDEFDPTKHKYDAEYYIENQVLPAVERILRAFGYRKEDLRYQKTRQVGLSAWLKPKGT

SEQ ID NO: 2739 - protein, 774 aa, synthetic construct
MILDTDMITEDGKPVFRIFKKENGEFKIEYDRTFEPYFYALLKDDSAIEEVKKITAERHGTVVTVKRVEKVQKKFLGRPVEVWKLYFTHPQDKPAIRDKIREHPAVIDIYEYDIPFAKRYLIDKGLVPMEGDEELKMLAFDIETLYHEGEEFAEGPILMISYADEEGARVITWKNVDLPYVDVVSTEREMIKRFLRVVKEKDPDVLITYNGDNFDFAYLKKRCEKLGINFALGRDGSEPKIQRMGDRFAVEVKGRIHFDLYPVIRRTINLPTYTLEAVYEAVFGQPKEKVYAEEITTAWETGENLERVARYSMEDAKVTYELGKEFLPMEAQLSRLIGQSLWDVSRSSTGNLVEWFLLRKAYERNELAPNKPDEKELARRRQSYEGGYVKEPERGLWENIVYLDFRSLYPSIIITHNVSPDTLNREGCKEYDVAPQVGHRFCKDFPGFIPSLLGDLLEERQKIKKKMKATIDPIERKLLDYRQRAIKILANSYYGYYGYARARWYCKECAESVTAWGREYITMTIKEIEEKYGFKVIYSDTDGFFATIPGADAETVKKKAMEFLKYINAKLPGALELEYEGFYKRGFFVTKKKYAVIDEEGKITTRGLEIVRRDWSEIAKETQARVLEALLKDGDVEKAVRIVKEVTEKLSKYEVPPEKLVIHEQITRDLKDYKATGPHVAVAKRLAARGVKIRPGTVISYIVLKGSGRIGDRAIPFDEFDPTKHKYDAEYYIENQVLPAVERILRAFGYRKEDLRYQKTRQVGLSAWLKPKGT

SEQ ID NO: 2740 - protein, 774 aa, synthetic construct
MILDTDMITEDGKPVFRIFKKENGEFKIEYDRTFEPYFYALLKDDSAIEEVKKITAERHGTVVTVKRVEKVQKKFLGRPVEVWKLYFTHPQDQPAIRDKIREHPAVIDIYEYDIPFAKRYLIDKGLVPMEGDEELKMLAFDIETLYHEGEEFAEGPILMISYADEEGARVITWKNVDLPYVDVVSTEREMIKRFLRVVKEKDPDVLITYNGDNFDFAYLKKRCEKLGINFALGRDGSEPKIQRMGDRFAVEVKGRIHFDLYPVIRRTINLPTYTLEAVYEAVFGQPKEKVYAEEITTAWETGENLERVARYSMEDAKVTYELGKEFLPMEAQLSRLIGQSLWDVSRSSTGNLVEWFLLRKAYERNELAPNKPDEKELARRRQSYEGGYVKEPERGLWENIVYLDFRSLYPSIIITHNVSPDTLNREGCKEYDVAPQVGHRFCKDFPGFIPSLLGDLLEERQKIKKKMKATIDPIERKLLDYRQRAIKILANSYYGYYGYARARWYCKECAESVTAWGREYITMTIKEIEEKYGFKVIYSDTDGFFATIPGADAETVKKKAMEFLKYINAKLPGALELEYEGFYKRGFFVTKKKYAVIDEEGKITTRGLEIVRRDWSEIAKETQARVLEALLKDGDVEKAVRIVKEVTEKLSKYEVPPEKLVIHEQITRDLKDYKATGPHVAVAKRLAARGVKIRPGTVISYIVLKGSGRIGDRAIPFDEFDPTKHKYDAEYYIENQVLPAVERILRAFGYRKEDLRYQKTRQVGLSAWLKPKGT

SEQ ID NO: 2741 - protein, 774 aa, synthetic construct
MILDTDMITEDGKPVFRIFKKENGEFKIEYDRTFEPYFYALLKDDSAIEEVKKITAERHGTVVTVKRVEKVQKKFLGRPVEVWKLYFTHPQDQPAIHDKIREHPAVIDIYEYDIPFAKRYLIDKGLVPMEGDEELKMLAFDIETLYHEGEEFAEGPILMISYADEEGARVITWKNVDLPYVDVVSTEREMIKRFLRVVKEKDPDVLITYNGDNFDFAYLKKRCEKLGINFALGRDGSEPKIQRMGDRFAVEVKGRIHFDLYPVIRRTINLPTYTLEAVYEAVFGQPKEKVYAEEITTAWETGENLERVARYSMEDAKVTYELGKEFLPMEAQLSRLIGQSLWDVSRSSTGNLVEWFLLRKAYERNELAPNKPDEKELARRRQSYEGGYVKEPERGLWENIVYLDFRSLYPSIIITHNVSPDTLNREGCKEYDVAPQVGHRFCKDFPGFIPSLLGDLLEERQKIKKKMKATIDPIERKLLDYRQRAIKILANSYYGYYGYARARWYCKECAESVTAWGREYITMTIKEIEEKYGFKVIYSDTDGFFATIPGADAETVKKKAMEFLKYINAKLPGALELEYEGFYKRGFFVTKKKYAVIDEEGKITTRGLEIVRRDWSEIAKETQARVLEALLKDGDVEKAVRIVKEVTEKLSKYEVPPEKLVIHEQITRDLKDYKATGPHVAVAKRLAARGVKIRPGTVISYIVLKGSGRIGDRAIPFDEFDPTKHKYDAEYYIENQVLPAVERILRAFGYRKEDLRYQKTRQVGLSAWLKPKGT

SEQ ID NO: 2742 - protein, 774 aa, synthetic construct
MILDTDMITEDGKPVFRIFKKENGEFKIEYDRTFEPYFYALLKDDSAIEEVKKITAERHGTVVTVKRVEKVQKKFLGRPVEVWKLYFTHPQDRPAIRDKIREHPAVIDIYEYDIPFAKRYLIDKGLVPMEGDEELKMLAFDIETLYHEGEEFAEGPILMISYADEEGARVITWKNVDLPYVDVVSTEREMIKRFLRVVKEKDPDVLITYNGDNFDFAYLKKRCEKLGINFALGRDGSEPKIQRMGDRFAVEVKGRIHFDLYPVIRRTINLPTYTLEAVYEAVFGQPKEKVYAEEITTAWETGENLERVARYSMEDAKVTYELGKEFLPMEAQLSRLIGQSLWDVSRSSTGNLVEWFLLRKAYERNELAPNKPDEKELARRRQSYEGGYVKEPERGLWENIVYLDFRSLYPSIIITHNVSPDTLNREGCKEYDVAPQVGHRFCKDFPGFIPSLLGDLLEERQKIKKKMKATIDPIERKLLDYRQRAIKILANSYYGYYGYARARWYCKECAESVTAWGREYITMTIKEIEEKYGFKVIYSDTDGFFATIPGADAETVKKKAMEFLKYINAKLPGALELEYEGFYKRGFFVTKKKYAVIDEEGKITTRGLEIVRRDWSEIAKETQARVLEALLKDGDVEKAVRIVKEVTEKLSKYEVPPEKLVIHEQITRDLKDYKATGPHVAVAKRLAARGVKIRPGTVISYIVLKGSGRIGDRAIPFDEFDPTKHKYDAEYYIENQVLPAVERILRAFGYRKEDLRYQKTRQVGLSAWLKPKGT

SEQ ID NO: 2743 - protein, 774 aa, synthetic construct
MILDTDMITEDGKPVFRIFKKENGEFKIEYDRTFEPYFYALLKDDSAIEEVKKITAERHGTVVTVKRVEKVQKKFLGRPVEVWKLYFTHPQDRPAIADKIREHPAVIDIYEYDIPFAKRYLIDKGLVPMEGDEELKMLAFDIETLYHEGEEFAEGPILMISYADEEGARVITWKNVDLPYVDVVSTEREMIKRFLRVVKEKDPDVLITYNGDNFDFAYLKKRCEKLGINFALGRDGSEPKIQRMGDRFAVEVKGRIHFDLYPVIRRTINLPTYTLEAVYEAVFGQPKEKVYAEEITTAWETGENLERVARYSMEDAKVTYELGKEFLPMEAQLSRLIGQSLWDVSRSSTGNLVEWFLLRKAYERNELAPNKPDEKELARRRQSYEGGYVKEPERGLWENIVYLDFRSLYPSIIITHNVSPDTLNREGCKEYDVAPQVGHRFCKDFPGFIPSLLGDLLEERQKIKKKMKATIDPIERKLLDYRQRAIKILANSYYGYYGYARARWYCKECAESVTAWGREYITMTIKEIEEKYGFKVIYSDTDGFFATIPGADAETVKKKAMEFLKYINAKLPGALELEYEGFYKRGFFVTKKKYAVIDEEGKITTRGLEIVRRDWSEIAKETQARVLEALLKDGDVEKAVRIVKEVTEKLSKYEVPPEKLVIHEQITRDLKDYKATGPHVAVAKRLAARGVKIRPGTVISYIVLKGSGRIGDRAIPFDEFDPTKHKYDAEYYIENQVLPAVERILRAFGYRKEDLRYQKTRQVGLSAWLKPKGT

SEQ ID NO: 2744 - protein, 774 aa, synthetic construct
MILDTDMITEDGKPVFRIFKKENGEFKIEYDRTFEPYFYALLKDDSAIEEVKKITAERHGTVVTVKRVEKVQKKFLGRPVEVWKLYFTHPQDRPAIFDKIREHPAVIDIYEYDIPFAKRYLIDKGLVPMEGDEELKMLAFDIETLYHEGEEFAEGPILMISYADEEGARVITWKNVDLPYVDVVSTEREMIKRFLRVVKEKDPDVLITYNGDNFDFAYLKKRCEKLGINFALGRDGSEPKIQRMGDRFAVEVKGRIHFDLYPVIRRTINLPTYTLEAVYEAVFGQPKEKVYAEEITTAWETGENLERVARYSMEDAKVTYELGKEFLPMEAQLSRLIGQSLWDVSRSSTGNLVEWFLLRKAYERNELAPNKPDEKELARRRQSYEGGYVKEPERGLWENIVYLDFRSLYPSIIITHNVSPDTLNREGCKEYDVAPQVGHRFCKDFPGFIPSLLGDLLEERQKIKKKMKATIDPIERKLLDYRQRAIKILANSYYGYYGYARARWYCKECAESVTAWGREYITMTIKEIEEKYGFKVIYSDTDGFFATIPGADAETVKKKAMEFLKYINAKLPGALELEYEGFYKRGFFVTKKKYAVIDEEGKITTRGLEIVRRDWSEIAKETQARVLEALLKDGDVEKAVRIVKEVTEKLSKYEVPPEKLVIHEQITRDLKDYKATGPHVAVAKRLAARGVKIRPGTVISYIVLKGSGRIGDRAIPFDEFDPTKHKYDAEYYIENQVLPAVERILRAFGYRKEDLRYQKTRQVGLSAWLKPKGT

SEQ ID NO: 2745 - protein, 774 aa, synthetic construct
MILDTDMITEDGKPVFRIFKKENGEFKIEYDRTFEPYFYALLKDDSAIEEVKKITAERHGTVVTVKRVEKVQKKFLGRPVEVWKLYFTHPQDRPAIWDKIREHPAVIDIYEYDIPFAKRYLIDKGLVPMEGDEELKMLAFDIETLYHEGEEFAEGPILMISYADEEGARVITWKNVDLPYVDVVSTEREMIKRFLRVVKEKDPDVLITYNGDNFDFAYLKKRCEKLGINFALGRDGSEPKIQRMGDRFAVEVKGRIHFDLYPVIRRTINLPTYTLEAVYEAVFGQPKEKVYAEEITTAWETGENLERVARYSMEDAKVTYELGKEFLPMEAQLSRLIGQSLWDVSRSSTGNLVEWFLLRKAYERNELAPNKPDEKELARRRQSYEGGYVKEPERGLWENIVYLDFRSLYPSIIITHNVSPDTLNREGCKEYDVAPQVGHRFCKDFPGFIPSLLGDLLEERQKIKKKMKATIDPIERKLLDYRQRAIKILANSYYGYYGYARARWYCKECAESVTAWGREYITMTIKEIEEKYGFKVIYSDTDGFFATIPGADAETVKKKAMEFLKYINAKLPGALELEYEGFYKRGFFVTKKKYAVIDEEGKITTRGLEIVRRDWSEIAKETQARVLEALLKDGDVEKAVRIVKEVTEKLSKYEVPPEKLVIHEQITRDLKDYKATGPHVAVAKRLAARGVKIRPGTVISYIVLKGSGRIGDRAIPFDEFDPTKHKYDAEYYIENQVLPAVERILRAFGYRKEDLRYQKTRQVGLSAWLKPKGT

SEQ ID NO: 2746 - protein, 774 aa, synthetic construct
MILDTDMITEDGKPVHRIFKKENGEFKIEYDRTFEHYFYALLKDDSAIEEVKKITAERHGTVVTVKRVEKVQKKFLGRPVEVWKLYFTHWQDVPAIRDKIREHPAVIDIYEYDIPFAKRYLIDKGLVPMEGDEELKMLAFDIETLYHEGEEFAEGPILMISYADEEGARVITWKNVDLPYVDVVSTEREMIKRFLRVVKEKDPDVLITYNGDNFDFAYLKKRCEKLGINFALGRDGSEPKIQRMGDRFAVEVKGRIHFDLYPVIRRTINLPTYTLEAVYEAVFGQPKEKVYAEEITTAWETGENLERVARYSMEDAKVTYELGKEFLPMEAQLSRLIGQSLWDVSRSSTGNLVEWFLLRKAYERNELAPNKPDEKELARRRQSYEGGYVKEPERGLWENIVYLDFRSLYPSIIITHNVSPDTLNREGCKEYDVAPQVGHRFCKDFPGFIPSLLGDLLEERQKIKKKMKATIDPIERKLLDYRQRAIKILANSYYGYYGYARARWYCKECAESVTAWGREYITMTIKEIEEKYGFKVIYSDTDGFFATIPGADAETVKKKAMEFLKYINAKLPGALELEYEGFYKRGFFVTKKKYAVIDEEGKITTRGLEIVRRDWSEIAKETQARVLEALLKDGDVEKAVRIVKEVTEKLSKYEVPPEKLVIHEQITRDLKDYKATGPHVAVAKRLAARGVKIRPGTVISYIVLKGSGRIGDRAIPFDEFDPTKHKYDAEYYIENQVLPAVERILRAFGYRKEDLRYQKTRQVGLSAWLKPKGT

SEQ ID NO: 2747 - protein, 774 aa, synthetic construct
MILDTDMITEDGKPVHRIFKKENGEFKIEYDRTFEHYFYALLKDDSAIEEVKKITAERHGTVVTVKRVEKVQKKFLGRPVEVWKLYFTHPQDIPAIRDKIREHPAVIDIYEYDIPFAKRYLIDKGLVPMEGDEELKMLAFDIETLYHEGEEFAEGPILMISYADEEGARVITWKNVDLPYVDVVSTEREMIKRFLRVVKEKDPDVLITYNGDNFDFAYLKKRCEKLGINFALGRDGSEPKIQRMGDRFAVEVKGRIHFDLYPVIRRTINLPTYTLEAVYEAVFGQPKEKVYAEEITTAWETGENLERVARYSMEDAKVTYELGKEFLPMEAQLSRLIGQSLWDVSRSSTGNLVEWFLLRKAYERNELAPNKPDEKELARRRQSYEGGYVKEPERGLWENIVYLDFRSLYPSIIITHNVSPDTLNREGCKEYDVAPQVGHRFCKDFPGFIPSLLGDLLEERQKIKKKMKATIDPIERKLLDYRQRAIKILANSYYGYYGYARARWYCKECAESVTAWGREYITMTIKEIEEKYGFKVIYSDTDGFFATIPGADAETVKKKAMEFLKYINAKLPGALELEYEGFYKRGFFVTKKKYAVIDEEGKITTRGLEIVRRDWSEIAKETQARVLEALLKDGDVEKAVRIVKEVTEKLSKYEVPPEKLVIHEQITRDLKDYKATGPHVAVAKRLAARGVKIRPGTVISYIVLKGSGRIGDRAIPFDEFDPTKHKYDAEYYIENQVLPAVERILRAFGYRKEDLRYQKTRQVGLSAWLKPKGT

SEQ ID NO: 2748 - protein, 774 aa, synthetic construct
MILDTDMITEDGKPVHRIFKKENGEFKIEYDRTFEHYFYALLKDDSAIEEVKKITAERHGTVVTVKRVEKVQKKFLGRPVEVWKLYFTHPQDRPAIRDKIREHPAVIDIYEYDIPFAKRYLIDKGLVPMEGDEELKMLAFDIETLYHEGEEFAEGPILMISYADEEGARVITWKNVDLPYVDVVSTEREMIKRFLRVVKEKDPDVLITYNGDNFDFAYLKKRCEKLGINFALGRDGSEPKIQRMGDRFAVEVKGRIHFDLYPVIRRTINLPTYTLEAVYEAVFGQPKEKVYAEEITTAWETGENLERVARYSMEDAKVTYELGKEFLPMEAQLSRLIGQSLWDVSRSSTGNLVEWFLLRKAYERNELAPNKPDEKELARRRQSYEGGYVKEPERGLWENIVYLDFRSLYPSIIITHNVSPDTLNREGCKEYDVAPQVGHRFCKDFPGFIPSLLGDLLEERQKIKKKMKATIDPIERKLLDYRQRAIKILANSYYGYYGYARARWYCKECAESVTAWGREYITMTIKEIEEKYGFKVIYSDTDGFFATIPGADAETVKKKAMEFLKYINAKLPGALELEYEGFYKRGFFVTKKKYAVIDEEGKITTRGLEIVRRDWSEIAKETQARVLEALLKDGDVEKAVRIVKEVTEKLSKYEVPPEKLVIHEQITRDLKDYKATGPHVAVAKRLAARGVKIRPGTVISYIVLKGSGRIGDRAIPFDEFDPTKHKYDAEYYIENQVLPAVERILRAFGYRKEDLRYQKTRQVGLSAWLKPKGT

SEQ ID NO: 2749 - protein, 774 aa, synthetic construct
MILDTDMITEDGKPVHRIFKKENGEFKIEYDRTFEPYFYALLKDDSAIEEVKKITAERHGTVVTVKRVEKVQKKFLGRPVEVWKLYFTHWQDIPAIRDKIREHPAVIDIYEYDIPFAKRYLIDKGLVPMEGDEELKMLAFDIETLYHEGEEFAEGPILMISYADEEGARVITWKNVDLPYVDVVSTEREMIKRFLRVVKEKDPDVLITYNGDNFDFAYLKKRCEKLGINFALGRDGSEPKIQRMGDRFAVEVKGRIHFDLYPVIRRTINLPTYTLEAVYEAVFGQPKEKVYAEEITTAWETGENLERVARYSMEDAKVTYELGKEFLPMEAQLSRLIGQSLWDVSRSSTGNLVEWFLLRKAYERNELAPNKPDEKELARRRQSYEGGYVKEPERGLWENIVYLDFRSLYPSIIITHNVSPDTLNREGCKEYDVAPQVGHRFCKDFPGFIPSLLGDLLEERQKIKKKMKATIDPIERKLLDYRQRAIKILANSYYGYYGYARARWYCKECAESVTAWGREYITMTIKEIEEKYGFKVIYSDTDGFFATIPGADAETVKKKAMEFLKYINAKLPGALELEYEGFYKRGFFVTKKKYAVIDEEGKITTRGLEIVRRDWSEIAKETQARVLEALLKDGDVEKAVRIVKEVTEKLSKYEVPPEKLVIHEQITRDLKDYKATGPHVAVAKRLAARGVKIRPGTVISYIVLKGSGRIGDRAIPFDEFDPTKHKYDAEYYIENQVLPAVERILRAFGYRKEDLRYQKTRQVGLSAWLKPKGT

SEQ ID NO: 2750 - protein, 774 aa, synthetic construct
MILDTDMITEDGKPVLRIFKKENGEFKIEYDRTFEPYFYALLKDDSAIEEVKKITAERHGTVVTVKRVEKVQKKFLGRPVEVWKLYFTHPQDVPAIRDKIREHPAVIDIYEYDIPFAKRYLIDKGLVPMEGDEELKMLAFDIETLYHEGEEFAEGPILMISYADEEGARVITWKNVDLPYVDVVSTEREMIKRFLRVVKEKDPDVLITYNGDNFDFAYLKKRCEKLGINFALGRDGSEPKIQRMGDRFAVEVKGRIHFDLYPVIRRTINLPTYTLEAVYEAVFGQPKEKVYAEEITTAWETGENLERVARYSMEDAKVTYELGKEFLPMEAQLSRLIGQSLWDVSRSSTGNLVEWFLLRKAYERNELAPNKPDEKELARRRQSYEGGYVKEPERGLWENIVYLDFRSLYPSIIITHNVSPDTLNREGCKEYDVAPQVGHRFCKDFPGFIPSLLGDLLEERQKIKKKMKATIDPIERKLLDYRQRAIKILANSYYGYYGYARARWYCKECAESVTAWGREYITMTIKEIEEKYGFKVIYSDTDGFFATIPGADAETVKKKAMEFLKYINAKLPGALELEYEGFYKRGFFVTKKKYAVIDEEGKITTRGLEIVRRDWSEIAKETQARVLEALLKDGDVEKAVRIVKEVTEKLSKYEVPPEKLVIHEQITRDLKDYKATGPHVAVAKRLAARGVKIRPGTVISYIVLKGSGRIGDRAIPFDEFDPTKHKYDAEYYIENQVLPAVERILRAFGYRKEDLRYQKTRQVGLSAWLKPKGT

SEQ ID NO: 2751 - protein, 774 aa, synthetic construct
MILDTDMITEDGKPVLRIFKKENGEFKIEYDRTFEAYFYALLKDDSAIEEVKKITAERHGTVVTVKRVEKVQKKFLGRPVEVWKLYFTHPQDVPAIRDKIREHPAVIDIYEYDIPFAKRYLIDKGLVPMEGDEELKMLAFDIETLYHEGEEFAEGPILMISYADEEGARVITWKNVDLPYVDVVSTEREMIKRFLRVVKEKDPDVLITYNGDNFDFAYLKKRCEKLGINFALGRDGSEPKIQRMGDRFAVEVKGRIHFDLYPVIRRTINLPTYTLEAVYEAVFGQPKEKVYAEEITTAWETGENLERVARYSMEDAKVTYELGKEFLPMEAQLSRLIGQSLWDVSRSSTGNLVEWFLLRKAYERNELAPNKPDEKELARRRQSYEGGYVKEPERGLWENIVYLDFRSLYPSIIITHNVSPDTLNREGCKEYDVAPQVGHRFCKDFPGFIPSLLGDLLEERQKIKKKMKATIDPIERKLLDYRQRAIKILANSYYGYYGYARARWYCKECAESVTAWGREYITMTIKEIEEKYGFKVIYSDTDGFFATIPGADAETVKKKAMEFLKYINAKLPGALELEYEGFYKRGFFVTKKKYAVIDEEGKITTRGLEIVRRDWSEIAKETQARVLEALLKDGDVEKAVRIVKEVTEKLSKYEVPPEKLVIHEQITRDLKDYKATGPHVAVAKRLAARGVKIRPGTVISYIVLKGSGRIGDRAIPFDEFDPTKHKYDAEYYIENQVLPAVERILRAFGYRKEDLRYQKTRQVGLSAWLKPKGT

SEQ ID NO: 2752 - protein, 774 aa, synthetic construct
MILDTDMITEDGKPVLRIFKKENGEFKIEYDRTFEAYFYALLKDDSAIEEVKKITAERHGTVVTVKRVEKVQKKFLGRPVEVWKLYFTHFQDVPAIRDKIREHPAVIDIYEYDIPFAKRYLIDKGLVPMEGDEELKMLAFDIETLYHEGEEFAEGPILMISYADEEGARVITWKNVDLPYVDVVSTEREMIKRFLRVVKEKDPDVLITYNGDNFDFAYLKKRCEKLGINFALGRDGSEPKIQRMGDRFAVEVKGRIHFDLYPVIRRTINLPTYTLEAVYEAVFGQPKEKVYAEEITTAWETGENLERVARYSMEDAKVTYELGKEFLPMEAQLSRLIGQSLWDVSRSSTGNLVEWFLLRKAYERNELAPNKPDEKELARRRQSYEGGYVKEPERGLWENIVYLDFRSLYPSIIITHNVSPDTLNREGCKEYDVAPQVGHRFCKDFPGFIPSLLGDLLEERQKIKKKMKATIDPIERKLLDYRQRAIKILANSYYGYYGYARARWYCKECAESVTAWGREYITMTIKEIEEKYGFKVIYSDTDGFFATIPGADAETVKKKAMEFLKYINAKLPGALELEYEGFYKRGFFVTKKKYAVIDEEGKITTRGLEIVRRDWSEIAKETQARVLEALLKDGDVEKAVRIVKEVTEKLSKYEVPPEKLVIHEQITRDLKDYKATGPHVAVAKRLAARGVKIRPGTVISYIVLKGSGRIGDRAIPFDEFDPTKHKYDAEYYIENQVLPAVERILRAFGYRKEDLRYQKTRQVGLSAWLKPKGT

SEQ ID NO: 2753 - protein, 774 aa, synthetic construct
MILDTDMITEDGKPVLRIFKKENGEFKIEYDRTFEAYFYALLKDDSAIEEVKKITAERHGTVVTVKRVEKVQKKFLGRPVEVWKLYFTHFQDIPAIRDKIREHPAVIDIYEYDIPFAKRYLIDKGLVPMEGDEELKMLAFDIETLYHEGEEFAEGPILMISYADEEGARVITWKNVDLPYVDVVSTEREMIKRFLRVVKEKDPDVLITYNGDNFDFAYLKKRCEKLGINFALGRDGSEPKIQRMGDRFAVEVKGRIHFDLYPVIRRTINLPTYTLEAVYEAVFGQPKEKVYAEEITTAWETGENLERVARYSMEDAKVTYELGKEFLPMEAQLSRLIGQSLWDVSRSSTGNLVEWFLLRKAYERNELAPNKPDEKELARRRQSYEGGYVKEPERGLWENIVYLDFRSLYPSIIITHNVSPDTLNREGCKEYDVAPQVGHRFCKDFPGFIPSLLGDLLEERQKIKKKMKATIDPIERKLLDYRQRAIKILANSYYGYYGYARARWYCKECAESVTAWGREYITMTIKEIEEKYGFKVIYSDTDGFFATIPGADAETVKKKAMEFLKYINAKLPGALELEYEGFYKRGFFVTKKKYAVIDEEGKITTRGLEIVRRDWSEIAKETQARVLEALLKDGDVEKAVRIVKEVTEKLSKYEVPPEKLVIHEQITRDLKDYKATGPHVAVAKRLAARGVKIRPGTVISYIVLKGSGRIGDRAIPFDEFDPTKHKYDAEYYIENQVLPAVERILRAFGYRKEDLRYQKTRQVGLSAWLKPKGT

SEQ ID NO: 2754 - protein, 774 aa, synthetic construct
MILDTDMITEDGKPVLRIFKKENGEFKIEYDRTFEAYFYALLKDDSAIEEVKKITAERHGTVVTVKRVEKVQKKFLGRPVEVWKLYFTHFQDIPAIHDKIREHPAVIDIYEYDIPFAKRYLIDKGLVPMEGDEELKMLAFDIETLYHEGEEFAEGPILMISYADEEGARVITWKNVDLPYVDVVSTEREMIKRFLRVVKEKDPDVLITYNGDNFDFAYLKKRCEKLGINFALGRDGSEPKIQRMGDRFAVEVKGRIHFDLYPVIRRTINLPTYTLEAVYEAVFGQPKEKVYAEEITTAWETGENLERVARYSMEDAKVTYELGKEFLPMEAQLSRLIGQSLWDVSRSSTGNLVEWFLLRKAYERNELAPNKPDEKELARRRQSYEGGYVKEPERGLWENIVYLDFRSLYPSIIITHNVSPDTLNREGCKEYDVAPQVGHRFCKDFPGFIPSLLGDLLEERQKIKKKMKATIDPIERKLLDYRQRAIKILANSYYGYYGYARARWYCKECAESVTAWGREYITMTIKEIEEKYGFKVIYSDTDGFFATIPGADAETVKKKAMEFLKYINAKLPGALELEYEGFYKRGFFVTKKKYAVIDEEGKITTRGLEIVRRDWSEIAKETQARVLEALLKDGDVEKAVRIVKEVTEKLSKYEVPPEKLVIHEQITRDLKDYKATGPHVAVAKRLAARGVKIRPGTVISYIVLKGSGRIGDRAIPFDEFDPTKHKYDAEYYIENQVLPAVERILRAFGYRKEDLRYQKTRQVGLSAWLKPKGT

SEQ ID NO: 2755 - protein, 774 aa, synthetic construct
MILDTDMITEDGKPVLRIFKKENGEFKIEYDRTFEAYFYALLKDDSAIEEVKKITAERHGTVVTVKRVEKVQKKFLGRPVEVWKLYFTHIQDVPAIFDKIREHPAVIDIYEYDIPFAKRYLIDKGLVPMEGDEELKMLAFDIETLYHEGEEFAEGPILMISYADEEGARVITWKNVDLPYVDVVSTEREMIKRFLRVVKEKDPDVLITYNGDNFDFAYLKKRCEKLGINFALGRDGSEPKIQRMGDRFAVEVKGRIHFDLYPVIRRTINLPTYTLEAVYEAVFGQPKEKVYAEEITTAWETGENLERVARYSMEDAKVTYELGKEFLPMEAQLSRLIGQSLWDVSRSSTGNLVEWFLLRKAYERNELAPNKPDEKELARRRQSYEGGYVKEPERGLWENIVYLDFRSLYPSIIITHNVSPDTLNREGCKEYDVAPQVGHRFCKDFPGFIPSLLGDLLEERQKIKKKMKATIDPIERKLLDYRQRAIKILANSYYGYYGYARARWYCKECAESVTAWGREYITMTIKEIEEKYGFKVIYSDTDGFFATIPGADAETVKKKAMEFLKYINAKLPGALELEYEGFYKRGFFVTKKKYAVIDEEGKITTRGLEIVRRDWSEIAKETQARVLEALLKDGDVEKAVRIVKEVTEKLSKYEVPPEKLVIHEQITRDLKDYKATGPHVAVAKRLAARGVKIRPGTVISYIVLKGSGRIGDRAIPFDEFDPTKHKYDAEYYIENQVLPAVERILRAFGYRKEDLRYQKTRQVGLSAWLKPKGT

SEQ ID NO: 2756 - protein, 774 aa, synthetic construct
MILDTDMITEDGKPVLRIFKKENGEFKIEYDRTFEAYFYALLKDDSAIEEVKKITAERHGTVVTVKRVEKVQKKFLGRPVEVWKLYFTHIQDIPAIHDKIREHPAVIDIYEYDIPFAKRYLIDKGLVPMEGDEELKMLAFDIETLYHEGEEFAEGPILMISYADEEGARVITWKNVDLPYVDVVSTEREMIKRFLRVVKEKDPDVLITYNGDNFDFAYLKKRCEKLGINFALGRDGSEPKIQRMGDRFAVEVKGRIHFDLYPVIRRTINLPTYTLEAVYEAVFGQPKEKVYAEEITTAWETGENLERVARYSMEDAKVTYELGKEFLPMEAQLSRLIGQSLWDVSRSSTGNLVEWFLLRKAYERNELAPNKPDEKELARRRQSYEGGYVKEPERGLWENIVYLDFRSLYPSIIITHNVSPDTLNREGCKEYDVAPQVGHRFCKDFPGFIPSLLGDLLEERQKIKKKMKATIDPIERKLLDYRQRAIKILANSYYGYYGYARARWYCKECAESVTAWGREYITMTIKEIEEKYGFKVIYSDTDGFFATIPGADAETVKKKAMEFLKYINAKLPGALELEYEGFYKRGFFVTKKKYAVIDEEGKITTRGLEIVRRDWSEIAKETQARVLEALLKDGDVEKAVRIVKEVTEKLSKYEVPPEKLVIHEQITRDLKDYKATGPHVAVAKRLAARGVKIRPGTVISYIVLKGSGRIGDRAIPFDEFDPTKHKYDAEYYIENQVLPAVERILRAFGYRKEDLRYQKTRQVGLSAWLKPKGT

SEQ ID NO: 2757 - protein, 774 aa, synthetic construct
MILDTDMITEDGKPVLRIFKKENGEFKIEYDRTFEAYFYALLKDDSAIEEVKKITAERHGTVVTVKRVEKVQKKFLGRPVEVWKLYFTHSQDIPAIHDKIREHPAVIDIYEYDIPFAKRYLIDKGLVPMEGDEELKMLAFDIETLYHEGEEFAEGPILMISYADEEGARVITWKNVDLPYVDVVSTEREMIKRFLRVVKEKDPDVLITYNGDNFDFAYLKKRCEKLGINFALGRDGSEPKIQRMGDRFAVEVKGRIHFDLYPVIRRTINLPTYTLEAVYEAVFGQPKEKVYAEEITTAWETGENLERVARYSMEDAKVTYELGKEFLPMEAQLSRLIGQSLWDVSRSSTGNLVEWFLLRKAYERNELAPNKPDEKELARRRQSYEGGYVKEPERGLWENIVYLDFRSLYPSIIITHNVSPDTLNREGCKEYDVAPQVGHRFCKDFPGFIPSLLGDLLEERQKIKKKMKATIDPIERKLLDYRQRAIKILANSYYGYYGYARARWYCKECAESVTAWGREYITMTIKEIEEKYGFKVIYSDTDGFFATIPGADAETVKKKAMEFLKYINAKLPGALELEYEGFYKRGFFVTKKKYAVIDEEGKITTRGLEIVRRDWSEIAKETQARVLEALLKDGDVEKAVRIVKEVTEKLSKYEVPPEKLVIHEQITRDLKDYKATGPHVAVAKRLAARGVKIRPGTVISYIVLKGSGRIGDRAIPFDEFDPTKHKYDAEYYIENQVLPAVERILRAFGYRKEDLRYQKTRQVGLSAWLKPKGT

SEQ ID NO: 2758 - protein, 774 aa, synthetic construct
MILDTDMITEDGKPVLRIFKKENGEFKIEYDRTFEAYFYALLKDDSAIEEVKKITAERHGTVVTVKRVEKVQKKFLGRPVEVWKLYFTHWQDVPAIRDKIREHPAVIDIYEYDIPFAKRYLIDKGLVPMEGDEELKMLAFDIETLYHEGEEFAEGPILMISYADEEGARVITWKNVDLPYVDVVSTEREMIKRFLRVVKEKDPDVLITYNGDNFDFAYLKKRCEKLGINFALGRDGSEPKIQRMGDRFAVEVKGRIHFDLYPVIRRTINLPTYTLEAVYEAVFGQPKEKVYAEEITTAWETGENLERVARYSMEDAKVTYELGKEFLPMEAQLSRLIGQSLWDVSRSSTGNLVEWFLLRKAYERNELAPNKPDEKELARRRQSYEGGYVKEPERGLWENIVYLDFRSLYPSIIITHNVSPDTLNREGCKEYDVAPQVGHRFCKDFPGFIPSLLGDLLEERQKIKKKMKATIDPIERKLLDYRQRAIKILANSYYGYYGYARARWYCKECAESVTAWGREYITMTIKEIEEKYGFKVIYSDTDGFFATIPGADAETVKKKAMEFLKYINAKLPGALELEYEGFYKRGFFVTKKKYAVIDEEGKITTRGLEIVRRDWSEIAKETQARVLEALLKDGDVEKAVRIVKEVTEKLSKYEVPPEKLVIHEQITRDLKDYKATGPHVAVAKRLAARGVKIRPGTVISYIVLKGSGRIGDRAIPFDEFDPTKHKYDAEYYIENQVLPAVERILRAFGYRKEDLRYQKTRQVGLSAWLKPKGT

SEQ ID NO: 2759 - protein, 774 aa, synthetic construct
MILDTDMITEDGKPVLRIFKKENGEFKIEYDRTFEAYFYALLKDDSAIEEVKKITAERHGTVVTVKRVEKVQKKFLGRPVEVWKLYFTHWQDIPAIRDKIREHPAVIDIYEYDIPFAKRYLIDKGLVPMEGDEELKMLAFDIETLYHEGEEFAEGPILMISYADEEGARVITWKNVDLPYVDVVSTEREMIKRFLRVVKEKDPDVLITYNGDNFDFAYLKKRCEKLGINFALGRDGSEPKIQRMGDRFAVEVKGRIHFDLYPVIRRTINLPTYTLEAVYEAVFGQPKEKVYAEEITTAWETGENLERVARYSMEDAKVTYELGKEFLPMEAQLSRLIGQSLWDVSRSSTGNLVEWFLLRKAYERNELAPNKPDEKELARRRQSYEGGYVKEPERGLWENIVYLDFRSLYPSIIITHNVSPDTLNREGCKEYDVAPQVGHRFCKDFPGFIPSLLGDLLEERQKIKKKMKATIDPIERKLLDYRQRAIKILANSYYGYYGYARARWYCKECAESVTAWGREYITMTIKEIEEKYGFKVIYSDTDGFFATIPGADAETVKKKAMEFLKYINAKLPGALELEYEGFYKRGFFVTKKKYAVIDEEGKITTRGLEIVRRDWSEIAKETQARVLEALLKDGDVEKAVRIVKEVTEKLSKYEVPPEKLVIHEQITRDLKDYKATGPHVAVAKRLAARGVKIRPGTVISYIVLKGSGRIGDRAIPFDEFDPTKHKYDAEYYIENQVLPAVERILRAFGYRKEDLRYQKTRQVGLSAWLKPKGT

SEQ ID NO: 2760 - protein, 774 aa, synthetic construct
MILDTDMITEDGKPVLRIFKKENGEFKIEYDRTFEAYFYALLKDDSAIEEVKKITAERHGTVVTVKRVEKVQKKFLGRPVEVWKLYFTHWQDIPAIADKIREHPAVIDIYEYDIPFAKRYLIDKGLVPMEGDEELKMLAFDIETLYHEGEEFAEGPILMISYADEEGARVITWKNVDLPYVDVVSTEREMIKRFLRVVKEKDPDVLITYNGDNFDFAYLKKRCEKLGINFALGRDGSEPKIQRMGDRFAVEVKGRIHFDLYPVIRRTINLPTYTLEAVYEAVFGQPKEKVYAEEITTAWETGENLERVARYSMEDAKVTYELGKEFLPMEAQLSRLIGQSLWDVSRSSTGNLVEWFLLRKAYERNELAPNKPDEKELARRRQSYEGGYVKEPERGLWENIVYLDFRSLYPSIIITHNVSPDTLNREGCKEYDVAPQVGHRFCKDFPGFIPSLLGDLLEERQKIKKKMKATIDPIERKLLDYRQRAIKILANSYYGYYGYARARWYCKECAESVTAWGREYITMTIKEIEEKYGFKVIYSDTDGFFATIPGADAETVKKKAMEFLKYINAKLPGALELEYEGFYKRGFFVTKKKYAVIDEEGKITTRGLEIVRRDWSEIAKETQARVLEALLKDGDVEKAVRIVKEVTEKLSKYEVPPEKLVIHEQITRDLKDYKATGPHVAVAKRLAARGVKIRPGTVISYIVLKGSGRIGDRAIPFDEFDPTKHKYDAEYYIENQVLPAVERILRAFGYRKEDLRYQKTRQVGLSAWLKPKGT

SEQ ID NO: 2761 - protein, 774 aa, synthetic construct
MILDTDMITEDGKPVLRIFKKENGEFKIEYDRTFEAYFYALLKDDSAIEEVKKITAERHGTVVTVKRVEKVQKKFLGRPVEVWKLYFTHYQDIPAIRDKIREHPAVIDIYEYDIPFAKRYLIDKGLVPMEGDEELKMLAFDIETLYHEGEEFAEGPILMISYADEEGARVITWKNVDLPYVDVVSTEREMIKRFLRVVKEKDPDVLITYNGDNFDFAYLKKRCEKLGINFALGRDGSEPKIQRMGDRFAVEVKGRIHFDLYPVIRRTINLPTYTLEAVYEAVFGQPKEKVYAEEITTAWETGENLERVARYSMEDAKVTYELGKEFLPMEAQLSRLIGQSLWDVSRSSTGNLVEWFLLRKAYERNELAPNKPDEKELARRRQSYEGGYVKEPERGLWENIVYLDFRSLYPSIIITHNVSPDTLNREGCKEYDVAPQVGHRFCKDFPGFIPSLLGDLLEERQKIKKKMKATIDPIERKLLDYRQRAIKILANSYYGYYGYARARWYCKECAESVTAWGREYITMTIKEIEEKYGFKVIYSDTDGFFATIPGADAETVKKKAMEFLKYINAKLPGALELEYEGFYKRGFFVTKKKYAVIDEEGKITTRGLEIVRRDWSEIAKETQARVLEALLKDGDVEKAVRIVKEVTEKLSKYEVPPEKLVIHEQITRDLKDYKATGPHVAVAKRLAARGVKIRPGTVISYIVLKGSGRIGDRAIPFDEFDPTKHKYDAEYYIENQVLPAVERILRAFGYRKEDLRYQKTRQVGLSAWLKPKGT

SEQ ID NO: 2762 - protein, 774 aa, synthetic construct
MILDTDMITEDGKPVLRIFKKENGEFKIEYDRTFEAYFYALLKDDSAIEEVKKITAERHGTVVTVKRVEKVQKKFLGRPVEVWKLYFTHPQDVPAIFDKIREHPAVIDIYEYDIPFAKRYLIDKGLVPMEGDEELKMLAFDIETLYHEGEEFAEGPILMISYADEEGARVITWKNVDLPYVDVVSTEREMIKRFLRVVKEKDPDVLITYNGDNFDFAYLKKRCEKLGINFALGRDGSEPKIQRMGDRFAVEVKGRIHFDLYPVIRRTINLPTYTLEAVYEAVFGQPKEKVYAEEITTAWETGENLERVARYSMEDAKVTYELGKEFLPMEAQLSRLIGQSLWDVSRSSTGNLVEWFLLRKAYERNELAPNKPDEKELARRRQSYEGGYVKEPERGLWENIVYLDFRSLYPSIIITHNVSPDTLNREGCKEYDVAPQVGHRFCKDFPGFIPSLLGDLLEERQKIKKKMKATIDPIERKLLDYRQRAIKILANSYYGYYGYARARWYCKECAESVTAWGREYITMTIKEIEEKYGFKVIYSDTDGFFATIPGADAETVKKKAMEFLKYINAKLPGALELEYEGFYKRGFFVTKKKYAVIDEEGKITTRGLEIVRRDWSEIAKETQARVLEALLKDGDVEKAVRIVKEVTEKLSKYEVPPEKLVIHEQITRDLKDYKATGPHVAVAKRLAARGVKIRPGTVISYIVLKGSGRIGDRAIPFDEFDPTKHKYDAEYYIENQVLPAVERILRAFGYRKEDLRYQKTRQVGLSAWLKPKGT

SEQ ID NO: 2763 - protein, 774 aa, synthetic construct
MILDTDMITEDGKPVLRIFKKENGEFKIEYDRTFEAYFYALLKDDSAIEEVKKITAERHGTVVTVKRVEKVQKKFLGRPVEVWKLYFTHPQDVPAIHDKIREHPAVIDIYEYDIPFAKRYLIDKGLVPMEGDEELKMLAFDIETLYHEGEEFAEGPILMISYADEEGARVITWKNVDLPYVDVVSTEREMIKRFLRVVKEKDPDVLITYNGDNFDFAYLKKRCEKLGINFALGRDGSEPKIQRMGDRFAVEVKGRIHFDLYPVIRRTINLPTYTLEAVYEAVFGQPKEKVYAEEITTAWETGENLERVARYSMEDAKVTYELGKEFLPMEAQLSRLIGQSLWDVSRSSTGNLVEWFLLRKAYERNELAPNKPDEKELARRRQSYEGGYVKEPERGLWENIVYLDFRSLYPSIIITHNVSPDTLNREGCKEYDVAPQVGHRFCKDFPGFIPSLLGDLLEERQKIKKKMKATIDPIERKLLDYRQRAIKILANSYYGYYGYARARWYCKECAESVTAWGREYITMTIKEIEEKYGFKVIYSDTDGFFATIPGADAETVKKKAMEFLKYINAKLPGALELEYEGFYKRGFFVTKKKYAVIDEEGKITTRGLEIVRRDWSEIAKETQARVLEALLKDGDVEKAVRIVKEVTEKLSKYEVPPEKLVIHEQITRDLKDYKATGPHVAVAKRLAARGVKIRPGTVISYIVLKGSGRIGDRAIPFDEFDPTKHKYDAEYYIENQVLPAVERILRAFGYRKEDLRYQKTRQVGLSAWLKPKGT

SEQ ID NO: 2764 - protein, 774 aa, synthetic construct
MILDTDMITEDGKPVLRIFKKENGEFKIEYDRTFEAYFYALLKDDSAIEEVKKITAERHGTVVTVKRVEKVQKKFLGRPVEVWKLYFTHPQDVPAIWDKIREHPAVIDIYEYDIPFAKRYLIDKGLVPMEGDEELKMLAFDIETLYHEGEEFAEGPILMISYADEEGARVITWKNVDLPYVDVVSTEREMIKRFLRVVKEKDPDVLITYNGDNFDFAYLKKRCEKLGINFALGRDGSEPKIQRMGDRFAVEVKGRIHFDLYPVIRRTINLPTYTLEAVYEAVFGQPKEKVYAEEITTAWETGENLERVARYSMEDAKVTYELGKEFLPMEAQLSRLIGQSLWDVSRSSTGNLVEWFLLRKAYERNELAPNKPDEKELARRRQSYEGGYVKEPERGLWENIVYLDFRSLYPSIIITHNVSPDTLNREGCKEYDVAPQVGHRFCKDFPGFIPSLLGDLLEERQKIKKKMKATIDPIERKLLDYRQRAIKILANSYYGYYGYARARWYCKECAESVTAWGREYITMTIKEIEEKYGFKVIYSDTDGFFATIPGADAETVKKKAMEFLKYINAKLPGALELEYEGFYKRGFFVTKKKYAVIDEEGKITTRGLEIVRRDWSEIAKETQARVLEALLKDGDVEKAVRIVKEVTEKLSKYEVPPEKLVIHEQITRDLKDYKATGPHVAVAKRLAARGVKIRPGTVISYIVLKGSGRIGDRAIPFDEFDPTKHKYDAEYYIENQVLPAVERILRAFGYRKEDLRYQKTRQVGLSAWLKPKGT

SEQ ID NO: 2765 - protein, 774 aa, synthetic construct
MILDTDMITEDGKPVLRIFKKENGEFKIEYDRTFEAYFYALLKDDSAIEEVKKITAERHGTVVTVKRVEKVQKKFLGRPVEVWKLYFTHPQDIPAIRDKIREHPAVIDIYEYDIPFAKRYLIDKGLVPMEGDEELKMLAFDIETLYHEGEEFAEGPILMISYADEEGARVITWKNVDLPYVDVVSTEREMIKRFLRVVKEKDPDVLITYNGDNFDFAYLKKRCEKLGINFALGRDGSEPKIQRMGDRFAVEVKGRIHFDLYPVIRRTINLPTYTLEAVYEAVFGQPKEKVYAEEITTAWETGENLERVARYSMEDAKVTYELGKEFLPMEAQLSRLIGQSLWDVSRSSTGNLVEWFLLRKAYERNELAPNKPDEKELARRRQSYEGGYVKEPERGLWENIVYLDFRSLYPSIIITHNVSPDTLNREGCKEYDVAPQVGHRFCKDFPGFIPSLLGDLLEERQKIKKKMKATIDPIERKLLDYRQRAIKILANSYYGYYGYARARWYCKECAESVTAWGREYITMTIKEIEEKYGFKVIYSDTDGFFATIPGADAETVKKKAMEFLKYINAKLPGALELEYEGFYKRGFFVTKKKYAVIDEEGKITTRGLEIVRRDWSEIAKETQARVLEALLKDGDVEKAVRIVKEVTEKLSKYEVPPEKLVIHEQITRDLKDYKATGPHVAVAKRLAARGVKIRPGTVISYIVLKGSGRIGDRAIPFDEFDPTKHKYDAEYYIENQVLPAVERILRAFGYRKEDLRYQKTRQVGLSAWLKPKGT

SEQ ID NO: 2766 - protein, 774 aa, synthetic construct
MILDTDMITEDGKPVLRIFKKENGEFKIEYDRTFEAYFYALLKDDSAIEEVKKITAERHGTVVTVKRVEKVQKKFLGRPVEVWKLYFTHPQDIPAIADKIREHPAVIDIYEYDIPFAKRYLIDKGLVPMEGDEELKMLAFDIETLYHEGEEFAEGPILMISYADEEGARVITWKNVDLPYVDVVSTEREMIKRFLRVVKEKDPDVLITYNGDNFDFAYLKKRCEKLGINFALGRDGSEPKIQRMGDRFAVEVKGRIHFDLYPVIRRTINLPTYTLEAVYEAVFGQPKEKVYAEEITTAWETGENLERVARYSMEDAKVTYELGKEFLPMEAQLSRLIGQSLWDVSRSSTGNLVEWFLLRKAYERNELAPNKPDEKELARRRQSYEGGYVKEPERGLWENIVYLDFRSLYPSIIITHNVSPDTLNREGCKEYDVAPQVGHRFCKDFPGFIPSLLGDLLEERQKIKKKMKATIDPIERKLLDYRQRAIKILANSYYGYYGYARARWYCKECAESVTAWGREYITMTIKEIEEKYGFKVIYSDTDGFFATIPGADAETVKKKAMEFLKYINAKLPGALELEYEGFYKRGFFVTKKKYAVIDEEGKITTRGLEIVRRDWSEIAKETQARVLEALLKDGDVEKAVRIVKEVTEKLSKYEVPPEKLVIHEQITRDLKDYKATGPHVAVAKRLAARGVKIRPGTVISYIVLKGSGRIGDRAIPFDEFDPTKHKYDAEYYIENQVLPAVERILRAFGYRKEDLRYQKTRQVGLSAWLKPKGT

SEQ ID NO: 2767 - protein, 774 aa, synthetic construct
MILDTDMITEDGKPVLRIFKKENGEFKIEYDRTFEAYFYALLKDDSAIEEVKKITAERHGTVVTVKRVEKVQKKFLGRPVEVWKLYFTHPQDIPAIFDKIREHPAVIDIYEYDIPFAKRYLIDKGLVPMEGDEELKMLAFDIETLYHEGEEFAEGPILMISYADEEGARVITWKNVDLPYVDVVSTEREMIKRFLRVVKEKDPDVLITYNGDNFDFAYLKKRCEKLGINFALGRDGSEPKIQRMGDRFAVEVKGRIHFDLYPVIRRTINLPTYTLEAVYEAVFGQPKEKVYAEEITTAWETGENLERVARYSMEDAKVTYELGKEFLPMEAQLSRLIGQSLWDVSRSSTGNLVEWFLLRKAYERNELAPNKPDEKELARRRQSYEGGYVKEPERGLWENIVYLDFRSLYPSIIITHNVSPDTLNREGCKEYDVAPQVGHRFCKDFPGFIPSLLGDLLEERQKIKKKMKATIDPIERKLLDYRQRAIKILANSYYGYYGYARARWYCKECAESVTAWGREYITMTIKEIEEKYGFKVIYSDTDGFFATIPGADAETVKKKAMEFLKYINAKLPGALELEYEGFYKRGFFVTKKKYAVIDEEGKITTRGLEIVRRDWSEIAKETQARVLEALLKDGDVEKAVRIVKEVTEKLSKYEVPPEKLVIHEQITRDLKDYKATGPHVAVAKRLAARGVKIRPGTVISYIVLKGSGRIGDRAIPFDEFDPTKHKYDAEYYIENQVLPAVERILRAFGYRKEDLRYQKTRQVGLSAWLKPKGT

SEQ ID NO: 2768 - protein, 774 aa, synthetic construct
MILDTDMITEDGKPVLRIFKKENGEFKIEYDRTFEAYFYALLKDDSAIEEVKKITAERHGTVVTVKRVEKVQKKFLGRPVEVWKLYFTHPQDIPAIHDKIREHPAVIDIYEYDIPFAKRYLIDKGLVPMEGDEELKMLAFDIETLYHEGEEFAEGPILMISYADEEGARVITWKNVDLPYVDVVSTEREMIKRFLRVVKEKDPDVLITYNGDNFDFAYLKKRCEKLGINFALGRDGSEPKIQRMGDRFAVEVKGRIHFDLYPVIRRTINLPTYTLEAVYEAVFGQPKEKVYAEEITTAWETGENLERVARYSMEDAKVTYELGKEFLPMEAQLSRLIGQSLWDVSRSSTGNLVEWFLLRKAYERNELAPNKPDEKELARRRQSYEGGYVKEPERGLWENIVYLDFRSLYPSIIITHNVSPDTLNREGCKEYDVAPQVGHRFCKDFPGFIPSLLGDLLEERQKIKKKMKATIDPIERKLLDYRQRAIKILANSYYGYYGYARARWYCKECAESVTAWGREYITMTIKEIEEKYGFKVIYSDTDGFFATIPGADAETVKKKAMEFLKYINAKLPGALELEYEGFYKRGFFVTKKKYAVIDEEGKITTRGLEIVRRDWSEIAKETQARVLEALLKDGDVEKAVRIVKEVTEKLSKYEVPPEKLVIHEQITRDLKDYKATGPHVAVAKRLAARGVKIRPGTVISYIVLKGSGRIGDRAIPFDEFDPTKHKYDAEYYIENQVLPAVERILRAFGYRKEDLRYQKTRQVGLSAWLKPKGT

SEQ ID NO: 2769 - protein, 774 aa, synthetic construct
MILDTDMITEDGKPVLRIFKKENGEFKIEYDRTFEAYFYALLKDDSAIEEVKKITAERHGTVVTVKRVEKVQKKFLGRPVEVWKLYFTHPQDQPAIRDKIREHPAVIDIYEYDIPFAKRYLIDKGLVPMEGDEELKMLAFDIETLYHEGEEFAEGPILMISYADEEGARVITWKNVDLPYVDVVSTEREMIKRFLRVVKEKDPDVLITYNGDNFDFAYLKKRCEKLGINFALGRDGSEPKIQRMGDRFAVEVKGRIHFDLYPVIRRTINLPTYTLEAVYEAVFGQPKEKVYAEEITTAWETGENLERVARYSMEDAKVTYELGKEFLPMEAQLSRLIGQSLWDVSRSSTGNLVEWFLLRKAYERNELAPNKPDEKELARRRQSYEGGYVKEPERGLWENIVYLDFRSLYPSIIITHNVSPDTLNREGCKEYDVAPQVGHRFCKDFPGFIPSLLGDLLEERQKIKKKMKATIDPIERKLLDYRQRAIKILANSYYGYYGYARARWYCKECAESVTAWGREYITMTIKEIEEKYGFKVIYSDTDGFFATIPGADAETVKKKAMEFLKYINAKLPGALELEYEGFYKRGFFVTKKKYAVIDEEGKITTRGLEIVRRDWSEIAKETQARVLEALLKDGDVEKAVRIVKEVTEKLSKYEVPPEKLVIHEQITRDLKDYKATGPHVAVAKRLAARGVKIRPGTVISYIVLKGSGRIGDRAIPFDEFDPTKHKYDAEYYIENQVLPAVERILRAFGYRKEDLRYQKTRQVGLSAWLKPKGT

SEQ ID NO: 2770 - protein, 774 aa, synthetic construct
MILDTDMITEDGKPVLRIFKKENGEFKIEYDRTFEAYFYALLKDDSAIEEVKKITAERHGTVVTVKRVEKVQKKFLGRPVEVWKLYFTHPQDQPAIADKIREHPAVIDIYEYDIPFAKRYLIDKGLVPMEGDEELKMLAFDIETLYHEGEEFAEGPILMISYADEEGARVITWKNVDLPYVDVVSTEREMIKRFLRVVKEKDPDVLITYNGDNFDFAYLKKRCEKLGINFALGRDGSEPKIQRMGDRFAVEVKGRIHFDLYPVIRRTINLPTYTLEAVYEAVFGQPKEKVYAEEITTAWETGENLERVARYSMEDAKVTYELGKEFLPMEAQLSRLIGQSLWDVSRSSTGNLVEWFLLRKAYERNELAPNKPDEKELARRRQSYEGGYVKEPERGLWENIVYLDFRSLYPSIIITHNVSPDTLNREGCKEYDVAPQVGHRFCKDFPGFIPSLLGDLLEERQKIKKKMKATIDPIERKLLDYRQRAIKILANSYYGYYGYARARWYCKECAESVTAWGREYITMTIKEIEEKYGFKVIYSDTDGFFATIPGADAETVKKKAMEFLKYINAKLPGALELEYEGFYKRGFFVTKKKYAVIDEEGKITTRGLEIVRRDWSEIAKETQARVLEALLKDGDVEKAVRIVKEVTEKLSKYEVPPEKLVIHEQITRDLKDYKATGPHVAVAKRLAARGVKIRPGTVISYIVLKGSGRIGDRAIPFDEFDPTKHKYDAEYYIENQVLPAVERILRAFGYRKEDLRYQKTRQVGLSAWLKPKGT

SEQ ID NO: 2771 - protein, 774 aa, synthetic construct
MILDTDMITEDGKPVLRIFKKENGEFKIEYDRTFEAYFYALLKDDSAIEEVKKITAERHGTVVTVKRVEKVQKKFLGRPVEVWKLYFTHPQDRPAIRDKIREHPAVIDIYEYDIPFAKRYLIDKGLVPMEGDEELKMLAFDIETLYHEGEEFAEGPILMISYADEEGARVITWKNVDLPYVDVVSTEREMIKRFLRVVKEKDPDVLITYNGDNFDFAYLKKRCEKLGINFALGRDGSEPKIQRMGDRFAVEVKGRIHFDLYPVIRRTINLPTYTLEAVYEAVFGQPKEKVYAEEITTAWETGENLERVARYSMEDAKVTYELGKEFLPMEAQLSRLIGQSLWDVSRSSTGNLVEWFLLRKAYERNELAPNKPDEKELARRRQSYEGGYVKEPERGLWENIVYLDFRSLYPSIIITHNVSPDTLNREGCKEYDVAPQVGHRFCKDFPGFIPSLLGDLLEERQKIKKKMKATIDPIERKLLDYRQRAIKILANSYYGYYGYARARWYCKECAESVTAWGREYITMTIKEIEEKYGFKVIYSDTDGFFATIPGADAETVKKKAMEFLKYINAKLPGALELEYEGFYKRGFFVTKKKYAVIDEEGKITTRGLEIVRRDWSEIAKETQARVLEALLKDGDVEKAVRIVKEVTEKLSKYEVPPEKLVIHEQITRDLKDYKATGPHVAVAKRLAARGVKIRPGTVISYIVLKGSGRIGDRAIPFDEFDPTKHKYDAEYYIENQVLPAVERILRAFGYRKEDLRYQKTRQVGLSAWLKPKGT

SEQ ID NO: 2772 - protein, 774 aa, synthetic construct
MILDTDMITEDGKPVLRIFKKENGEFKIEYDRTFEAYFYALLKDDSAIEEVKKITAERHGTVVTVKRVEKVQKKFLGRPVEVWKLYFTHPQDRPAIADKIREHPAVIDIYEYDIPFAKRYLIDKGLVPMEGDEELKMLAFDIETLYHEGEEFAEGPILMISYADEEGARVITWKNVDLPYVDVVSTEREMIKRFLRVVKEKDPDVLITYNGDNFDFAYLKKRCEKLGINFALGRDGSEPKIQRMGDRFAVEVKGRIHFDLYPVIRRTINLPTYTLEAVYEAVFGQPKEKVYAEEITTAWETGENLERVARYSMEDAKVTYELGKEFLPMEAQLSRLIGQSLWDVSRSSTGNLVEWFLLRKAYERNELAPNKPDEKELARRRQSYEGGYVKEPERGLWENIVYLDFRSLYPSIIITHNVSPDTLNREGCKEYDVAPQVGHRFCKDFPGFIPSLLGDLLEERQKIKKKMKATIDPIERKLLDYRQRAIKILANSYYGYYGYARARWYCKECAESVTAWGREYITMTIKEIEEKYGFKVIYSDTDGFFATIPGADAETVKKKAMEFLKYINAKLPGALELEYEGFYKRGFFVTKKKYAVIDEEGKITTRGLEIVRRDWSEIAKETQARVLEALLKDGDVEKAVRIVKEVTEKLSKYEVPPEKLVIHEQITRDLKDYKATGPHVAVAKRLAARGVKIRPGTVISYIVLKGSGRIGDRAIPFDEFDPTKHKYDAEYYIENQVLPAVERILRAFGYRKEDLRYQKTRQVGLSAWLKPKGT

SEQ ID NO: 2773 - protein, 774 aa, synthetic construct
MILDTDMITEDGKPVLRIFKKENGEFKIEYDRTFEHYFYALLKDDSAIEEVKKITAERHGTVVTVKRVEKVQKKFLGRPVEVWKLYFTHPQDVPAIRDKIREHPAVIDIYEYDIPFAKRYLIDKGLVPMEGDEELKMLAFDIETLYHEGEEFAEGPILMISYADEEGARVITWKNVDLPYVDVVSTEREMIKRFLRVVKEKDPDVLITYNGDNFDFAYLKKRCEKLGINFALGRDGSEPKIQRMGDRFAVEVKGRIHFDLYPVIRRTINLPTYTLEAVYEAVFGQPKEKVYAEEITTAWETGENLERVARYSMEDAKVTYELGKEFLPMEAQLSRLIGQSLWDVSRSSTGNLVEWFLLRKAYERNELAPNKPDEKELARRRQSYEGGYVKEPERGLWENIVYLDFRSLYPSIIITHNVSPDTLNREGCKEYDVAPQVGHRFCKDFPGFIPSLLGDLLEERQKIKKKMKATIDPIERKLLDYRQRAIKILANSYYGYYGYARARWYCKECAESVTAWGREYITMTIKEIEEKYGFKVIYSDTDGFFATIPGADAETVKKKAMEFLKYINAKLPGALELEYEGFYKRGFFVTKKKYAVIDEEGKITTRGLEIVRRDWSEIAKETQARVLEALLKDGDVEKAVRIVKEVTEKLSKYEVPPEKLVIHEQITRDLKDYKATGPHVAVAKRLAARGVKIRPGTVISYIVLKGSGRIGDRAIPFDEFDPTKHKYDAEYYIENQVLPAVERILRAFGYRKEDLRYQKTRQVGLSAWLKPKGT

SEQ ID NO: 2774 - protein, 774 aa, synthetic construct
MILDTDMITEDGKPVLRIFKKENGEFKIEYDRTFEHYFYALLKDDSAIEEVKKITAERHGTVVTVKRVEKVQKKFLGRPVEVWKLYFTHFQDVPAIADKIREHPAVIDIYEYDIPFAKRYLIDKGLVPMEGDEELKMLAFDIETLYHEGEEFAEGPILMISYADEEGARVITWKNVDLPYVDVVSTEREMIKRFLRVVKEKDPDVLITYNGDNFDFAYLKKRCEKLGINFALGRDGSEPKIQRMGDRFAVEVKGRIHFDLYPVIRRTINLPTYTLEAVYEAVFGQPKEKVYAEEITTAWETGENLERVARYSMEDAKVTYELGKEFLPMEAQLSRLIGQSLWDVSRSSTGNLVEWFLLRKAYERNELAPNKPDEKELARRRQSYEGGYVKEPERGLWENIVYLDFRSLYPSIIITHNVSPDTLNREGCKEYDVAPQVGHRFCKDFPGFIPSLLGDLLEERQKIKKKMKATIDPIERKLLDYRQRAIKILANSYYGYYGYARARWYCKECAESVTAWGREYITMTIKEIEEKYGFKVIYSDTDGFFATIPGADAETVKKKAMEFLKYINAKLPGALELEYEGFYKRGFFVTKKKYAVIDEEGKITTRGLEIVRRDWSEIAKETQARVLEALLKDGDVEKAVRIVKEVTEKLSKYEVPPEKLVIHEQITRDLKDYKATGPHVAVAKRLAARGVKIRPGTVISYIVLKGSGRIGDRAIPFDEFDPTKHKYDAEYYIENQVLPAVERILRAFGYRKEDLRYQKTRQVGLSAWLKPKGT

SEQ ID NO: 2775 - protein, 774 aa, synthetic construct
MILDTDMITEDGKPVLRIFKKENGEFKIEYDRTFEHYFYALLKDDSAIEEVKKITAERHGTVVTVKRVEKVQKKFLGRPVEVWKLYFTHFQDIPAIRDKIREHPAVIDIYEYDIPFAKRYLIDKGLVPMEGDEELKMLAFDIETLYHEGEEFAEGPILMISYADEEGARVITWKNVDLPYVDVVSTEREMIKRFLRVVKEKDPDVLITYNGDNFDFAYLKKRCEKLGINFALGRDGSEPKIQRMGDRFAVEVKGRIHFDLYPVIRRTINLPTYTLEAVYEAVFGQPKEKVYAEEITTAWETGENLERVARYSMEDAKVTYELGKEFLPMEAQLSRLIGQSLWDVSRSSTGNLVEWFLLRKAYERNELAPNKPDEKELARRRQSYEGGYVKEPERGLWENIVYLDFRSLYPSIIITHNVSPDTLNREGCKEYDVAPQVGHRFCKDFPGFIPSLLGDLLEERQKIKKKMKATIDPIERKLLDYRQRAIKILANSYYGYYGYARARWYCKECAESVTAWGREYITMTIKEIEEKYGFKVIYSDTDGFFATIPGADAETVKKKAMEFLKYINAKLPGALELEYEGFYKRGFFVTKKKYAVIDEEGKITTRGLEIVRRDWSEIAKETQARVLEALLKDGDVEKAVRIVKEVTEKLSKYEVPPEKLVIHEQITRDLKDYKATGPHVAVAKRLAARGVKIRPGTVISYIVLKGSGRIGDRAIPFDEFDPTKHKYDAEYYIENQVLPAVERILRAFGYRKEDLRYQKTRQVGLSAWLKPKGT

SEQ ID NO: 2776 - protein, 774 aa, synthetic construct
MILDTDMITEDGKPVLRIFKKENGEFKIEYDRTFEHYFYALLKDDSAIEEVKKITAERHGTVVTVKRVEKVQKKFLGRPVEVWKLYFTHPQDVPAIWDKIREHPAVIDIYEYDIPFAKRYLIDKGLVPMEGDEELKMLAFDIETLYHEGEEFAEGPILMISYADEEGARVITWKNVDLPYVDVVSTEREMIKRFLRVVKEKDPDVLITYNGDNFDFAYLKKRCEKLGINFALGRDGSEPKIQRMGDRFAVEVKGRIHFDLYPVIRRTINLPTYTLEAVYEAVFGQPKEKVYAEEITTAWETGENLERVARYSMEDAKVTYELGKEFLPMEAQLSRLIGQSLWDVSRSSTGNLVEWFLLRKAYERNELAPNKPDEKELARRRQSYEGGYVKEPERGLWENIVYLDFRSLYPSIIITHNVSPDTLNREGCKEYDVAPQVGHRFCKDFPGFIPSLLGDLLEERQKIKKKMKATIDPIERKLLDYRQRAIKILANSYYGYYGYARARWYCKECAESVTAWGREYITMTIKEIEEKYGFKVIYSDTDGFFATIPGADAETVKKKAMEFLKYINAKLPGALELEYEGFYKRGFFVTKKKYAVIDEEGKITTRGLEIVRRDWSEIAKETQARVLEALLKDGDVEKAVRIVKEVTEKLSKYEVPPEKLVIHEQITRDLKDYKATGPHVAVAKRLAARGVKIRPGTVISYIVLKGSGRIGDRAIPFDEFDPTKHKYDAEYYIENQVLPAVERILRAFGYRKEDLRYQKTRQVGLSAWLKPKGT

SEQ ID NO: 2777 - protein, 774 aa, synthetic construct
MILDTDMITEDGKPVLRIFKKENGEFKIEYDRTFEHYFYALLKDDSAIEEVKKITAERHGTVVTVKRVEKVQKKFLGRPVEVWKLYFTHPQDIPAIRDKIREHPAVIDIYEYDIPFAKRYLIDKGLVPMEGDEELKMLAFDIETLYHEGEEFAEGPILMISYADEEGARVITWKNVDLPYVDVVSTEREMIKRFLRVVKEKDPDVLITYNGDNFDFAYLKKRCEKLGINFALGRDGSEPKIQRMGDRFAVEVKGRIHFDLYPVIRRTINLPTYTLEAVYEAVFGQPKEKVYAEEITTAWETGENLERVARYSMEDAKVTYELGKEFLPMEAQLSRLIGQSLWDVSRSSTGNLVEWFLLRKAYERNELAPNKPDEKELARRRQSYEGGYVKEPERGLWENIVYLDFRSLYPSIIITHNVSPDTLNREGCKEYDVAPQVGHRFCKDFPGFIPSLLGDLLEERQKIKKKMKATIDPIERKLLDYRQRAIKILANSYYGYYGYARARWYCKECAESVTAWGREYITMTIKEIEEKYGFKVIYSDTDGFFATIPGADAETVKKKAMEFLKYINAKLPGALELEYEGFYKRGFFVTKKKYAVIDEEGKITTRGLEIVRRDWSEIAKETQARVLEALLKDGDVEKAVRIVKEVTEKLSKYEVPPEKLVIHEQITRDLKDYKATGPHVAVAKRLAARGVKIRPGTVISYIVLKGSGRIGDRAIPFDEFDPTKHKYDAEYYIENQVLPAVERILRAFGYRKEDLRYQKTRQVGLSAWLKPKGT

SEQ ID NO: 2778 - protein, 774 aa, synthetic construct
MILDTDMITEDGKPVLRIFKKENGEFKIEYDRTFEHYFYALLKDDSAIEEVKKITAERHGTVVTVKRVEKVQKKFLGRPVEVWKLYFTHPQDQPAIRDKIREHPAVIDIYEYDIPFAKRYLIDKGLVPMEGDEELKMLAFDIETLYHEGEEFAEGPILMISYADEEGARVITWKNVDLPYVDVVSTEREMIKRFLRVVKEKDPDVLITYNGDNFDFAYLKKRCEKLGINFALGRDGSEPKIQRMGDRFAVEVKGRIHFDLYPVIRRTINLPTYTLEAVYEAVFGQPKEKVYAEEITTAWETGENLERVARYSMEDAKVTYELGKEFLPMEAQLSRLIGQSLWDVSRSSTGNLVEWFLLRKAYERNELAPNKPDEKELARRRQSYEGGYVKEPERGLWENIVYLDFRSLYPSIIITHNVSPDTLNREGCKEYDVAPQVGHRFCKDFPGFIPSLLGDLLEERQKIKKKMKATIDPIERKLLDYRQRAIKILANSYYGYYGYARARWYCKECAESVTAWGREYITMTIKEIEEKYGFKVIYSDTDGFFATIPGADAETVKKKAMEFLKYINAKLPGALELEYEGFYKRGFFVTKKKYAVIDEEGKITTRGLEIVRRDWSEIAKETQARVLEALLKDGDVEKAVRIVKEVTEKLSKYEVPPEKLVIHEQITRDLKDYKATGPHVAVAKRLAARGVKIRPGTVISYIVLKGSGRIGDRAIPFDEFDPTKHKYDAEYYIENQVLPAVERILRAFGYRKEDLRYQKTRQVGLSAWLKPKGT

SEQ ID NO: 2779 - protein, 774 aa, synthetic construct
MILDTDMITEDGKPVLRIFKKENGEFKIEYDRTFEHYFYALLKDDSAIEEVKKITAERHGTVVTVKRVEKVQKKFLGRPVEVWKLYFTHPQDQPAIFDKIREHPAVIDIYEYDIPFAKRYLIDKGLVPMEGDEELKMLAFDIETLYHEGEEFAEGPILMISYADEEGARVITWKNVDLPYVDVVSTEREMIKRFLRVVKEKDPDVLITYNGDNFDFAYLKKRCEKLGINFALGRDGSEPKIQRMGDRFAVEVKGRIHFDLYPVIRRTINLPTYTLEAVYEAVFGQPKEKVYAEEITTAWETGENLERVARYSMEDAKVTYELGKEFLPMEAQLSRLIGQSLWDVSRSSTGNLVEWFLLRKAYERNELAPNKPDEKELARRRQSYEGGYVKEPERGLWENIVYLDFRSLYPSIIITHNVSPDTLNREGCKEYDVAPQVGHRFCKDFPGFIPSLLGDLLEERQKIKKKMKATIDPIERKLLDYRQRAIKILANSYYGYYGYARARWYCKECAESVTAWGREYITMTIKEIEEKYGFKVIYSDTDGFFATIPGADAETVKKKAMEFLKYINAKLPGALELEYEGFYKRGFFVTKKKYAVIDEEGKITTRGLEIVRRDWSEIAKETQARVLEALLKDGDVEKAVRIVKEVTEKLSKYEVPPEKLVIHEQITRDLKDYKATGPHVAVAKRLAARGVKIRPGTVISYIVLKGSGRIGDRAIPFDEFDPTKHKYDAEYYIENQVLPAVERILRAFGYRKEDLRYQKTRQVGLSAWLKPKGT

SEQ ID NO: 2780 - protein, 774 aa, synthetic construct
MILDTDMITEDGKPVLRIFKKENGEFKIEYDRTFERYFYALLKDDSAIEEVKKITAERHGTVVTVKRVEKVQKKFLGRPVEVWKLYFTHPQDVPAIRDKIREHPAVIDIYEYDIPFAKRYLIDKGLVPMEGDEELKMLAFDIETLYHEGEEFAEGPILMISYADEEGARVITWKNVDLPYVDVVSTEREMIKRFLRVVKEKDPDVLITYNGDNFDFAYLKKRCEKLGINFALGRDGSEPKIQRMGDRFAVEVKGRIHFDLYPVIRRTINLPTYTLEAVYEAVFGQPKEKVYAEEITTAWETGENLERVARYSMEDAKVTYELGKEFLPMEAQLSRLIGQSLWDVSRSSTGNLVEWFLLRKAYERNELAPNKPDEKELARRRQSYEGGYVKEPERGLWENIVYLDFRSLYPSIIITHNVSPDTLNREGCKEYDVAPQVGHRFCKDFPGFIPSLLGDLLEERQKIKKKMKATIDPIERKLLDYRQRAIKILANSYYGYYGYARARWYCKECAESVTAWGREYITMTIKEIEEKYGFKVIYSDTDGFFATIPGADAETVKKKAMEFLKYINAKLPGALELEYEGFYKRGFFVTKKKYAVIDEEGKITTRGLEIVRRDWSEIAKETQARVLEALLKDGDVEKAVRIVKEVTEKLSKYEVPPEKLVIHEQITRDLKDYKATGPHVAVAKRLAARGVKIRPGTVISYIVLKGSGRIGDRAIPFDEFDPTKHKYDAEYYIENQVLPAVERILRAFGYRKEDLRYQKTRQVGLSAWLKPKGT

SEQ ID NO: 2781 - protein, 774 aa, synthetic construct
MILDTDMITEDGKPVLRIFKKENGEFKIEYDRTFESYFYALLKDDSAIEEVKKITAERHGTVVTVKRVEKVQKKFLGRPVEVWKLYFTHPQDVPAIRDKIREHPAVIDIYEYDIPFAKRYLIDKGLVPMEGDEELKMLAFDIETLYHEGEEFAEGPILMISYADEEGARVITWKNVDLPYVDVVSTEREMIKRFLRVVKEKDPDVLITYNGDNFDFAYLKKRCEKLGINFALGRDGSEPKIQRMGDRFAVEVKGRIHFDLYPVIRRTINLPTYTLEAVYEAVFGQPKEKVYAEEITTAWETGENLERVARYSMEDAKVTYELGKEFLPMEAQLSRLIGQSLWDVSRSSTGNLVEWFLLRKAYERNELAPNKPDEKELARRRQSYEGGYVKEPERGLWENIVYLDFRSLYPSIIITHNVSPDTLNREGCKEYDVAPQVGHRFCKDFPGFIPSLLGDLLEERQKIKKKMKATIDPIERKLLDYRQRAIKILANSYYGYYGYARARWYCKECAESVTAWGREYITMTIKEIEEKYGFKVIYSDTDGFFATIPGADAETVKKKAMEFLKYINAKLPGALELEYEGFYKRGFFVTKKKYAVIDEEGKITTRGLEIVRRDWSEIAKETQARVLEALLKDGDVEKAVRIVKEVTEKLSKYEVPPEKLVIHEQITRDLKDYKATGPHVAVAKRLAARGVKIRPGTVISYIVLKGSGRIGDRAIPFDEFDPTKHKYDAEYYIENQVLPAVERILRAFGYRKEDLRYQKTRQVGLSAWLKPKGT

SEQ ID NO: 2782 - protein, 774 aa, synthetic construct
MILDTDMITEDGKPVLRIFKKENGEFKIEYDRTFESYFYALLKDDSAIEEVKKITAERHGTVVTVKRVEKVQKKFLGRPVEVWKLYFTHFQDIPAIRDKIREHPAVIDIYEYDIPFAKRYLIDKGLVPMEGDEELKMLAFDIETLYHEGEEFAEGPILMISYADEEGARVITWKNVDLPYVDVVSTEREMIKRFLRVVKEKDPDVLITYNGDNFDFAYLKKRCEKLGINFALGRDGSEPKIQRMGDRFAVEVKGRIHFDLYPVIRRTINLPTYTLEAVYEAVFGQPKEKVYAEEITTAWETGENLERVARYSMEDAKVTYELGKEFLPMEAQLSRLIGQSLWDVSRSSTGNLVEWFLLRKAYERNELAPNKPDEKELARRRQSYEGGYVKEPERGLWENIVYLDFRSLYPSIIITHNVSPDTLNREGCKEYDVAPQVGHRFCKDFPGFIPSLLGDLLEERQKIKKKMKATIDPIERKLLDYRQRAIKILANSYYGYYGYARARWYCKECAESVTAWGREYITMTIKEIEEKYGFKVIYSDTDGFFATIPGADAETVKKKAMEFLKYINAKLPGALELEYEGFYKRGFFVTKKKYAVIDEEGKITTRGLEIVRRDWSEIAKETQARVLEALLKDGDVEKAVRIVKEVTEKLSKYEVPPEKLVIHEQITRDLKDYKATGPHVAVAKRLAARGVKIRPGTVISYIVLKGSGRIGDRAIPFDEFDPTKHKYDAEYYIENQVLPAVERILRAFGYRKEDLRYQKTRQVGLSAWLKPKGT

SEQ ID NO: 2783 - protein, 774 aa, synthetic construct
MILDTDMITEDGKPVLRIFKKENGEFKIEYDRTFESYFYALLKDDSAIEEVKKITAERHGTVVTVKRVEKVQKKFLGRPVEVWKLYFTHWQDIPAIRDKIREHPAVIDIYEYDIPFAKRYLIDKGLVPMEGDEELKMLAFDIETLYHEGEEFAEGPILMISYADEEGARVITWKNVDLPYVDVVSTEREMIKRFLRVVKEKDPDVLITYNGDNFDFAYLKKRCEKLGINFALGRDGSEPKIQRMGDRFAVEVKGRIHFDLYPVIRRTINLPTYTLEAVYEAVFGQPKEKVYAEEITTAWETGENLERVARYSMEDAKVTYELGKEFLPMEAQLSRLIGQSLWDVSRSSTGNLVEWFLLRKAYERNELAPNKPDEKELARRRQSYEGGYVKEPERGLWENIVYLDFRSLYPSIIITHNVSPDTLNREGCKEYDVAPQVGHRFCKDFPGFIPSLLGDLLEERQKIKKKMKATIDPIERKLLDYRQRAIKILANSYYGYYGYARARWYCKECAESVTAWGREYITMTIKEIEEKYGFKVIYSDTDGFFATIPGADAETVKKKAMEFLKYINAKLPGALELEYEGFYKRGFFVTKKKYAVIDEEGKITTRGLEIVRRDWSEIAKETQARVLEALLKDGDVEKAVRIVKEVTEKLSKYEVPPEKLVIHEQITRDLKDYKATGPHVAVAKRLAARGVKIRPGTVISYIVLKGSGRIGDRAIPFDEFDPTKHKYDAEYYIENQVLPAVERILRAFGYRKEDLRYQKTRQVGLSAWLKPKGT

SEQ ID NO: 2784 - protein, 774 aa, synthetic construct
MILDTDMITEDGKPVLRIFKKENGEFKIEYDRTFESYFYALLKDDSAIEEVKKITAERHGTVVTVKRVEKVQKKFLGRPVEVWKLYFTHYQDIPAIRDKIREHPAVIDIYEYDIPFAKRYLIDKGLVPMEGDEELKMLAFDIETLYHEGEEFAEGPILMISYADEEGARVITWKNVDLPYVDVVSTEREMIKRFLRVVKEKDPDVLITYNGDNFDFAYLKKRCEKLGINFALGRDGSEPKIQRMGDRFAVEVKGRIHFDLYPVIRRTINLPTYTLEAVYEAVFGQPKEKVYAEEITTAWETGENLERVARYSMEDAKVTYELGKEFLPMEAQLSRLIGQSLWDVSRSSTGNLVEWFLLRKAYERNELAPNKPDEKELARRRQSYEGGYVKEPERGLWENIVYLDFRSLYPSIIITHNVSPDTLNREGCKEYDVAPQVGHRFCKDFPGFIPSLLGDLLEERQKIKKKMKATIDPIERKLLDYRQRAIKILANSYYGYYGYARARWYCKECAESVTAWGREYITMTIKEIEEKYGFKVIYSDTDGFFATIPGADAETVKKKAMEFLKYINAKLPGALELEYEGFYKRGFFVTKKKYAVIDEEGKITTRGLEIVRRDWSEIAKETQARVLEALLKDGDVEKAVRIVKEVTEKLSKYEVPPEKLVIHEQITRDLKDYKATGPHVAVAKRLAARGVKIRPGTVISYIVLKGSGRIGDRAIPFDEFDPTKHKYDAEYYIENQVLPAVERILRAFGYRKEDLRYQKTRQVGLSAWLKPKGT

SEQ ID NO: 2785 - protein, 774 aa, synthetic construct
MILDTDMITEDGKPVLRIFKKENGEFKIEYDRTFESYFYALLKDDSAIEEVKKITAERHGTVVTVKRVEKVQKKFLGRPVEVWKLYFTHPQDVPAIADKIREHPAVIDIYEYDIPFAKRYLIDKGLVPMEGDEELKMLAFDIETLYHEGEEFAEGPILMISYADEEGARVITWKNVDLPYVDVVSTEREMIKRFLRVVKEKDPDVLITYNGDNFDFAYLKKRCEKLGINFALGRDGSEPKIQRMGDRFAVEVKGRIHFDLYPVIRRTINLPTYTLEAVYEAVFGQPKEKVYAEEITTAWETGENLERVARYSMEDAKVTYELGKEFLPMEAQLSRLIGQSLWDVSRSSTGNLVEWFLLRKAYERNELAPNKPDEKELARRRQSYEGGYVKEPERGLWENIVYLDFRSLYPSIIITHNVSPDTLNREGCKEYDVAPQVGHRFCKDFPGFIPSLLGDLLEERQKIKKKMKATIDPIERKLLDYRQRAIKILANSYYGYYGYARARWYCKECAESVTAWGREYITMTIKEIEEKYGFKVIYSDTDGFFATIPGADAETVKKKAMEFLKYINAKLPGALELEYEGFYKRGFFVTKKKYAVIDEEGKITTRGLEIVRRDWSEIAKETQARVLEALLKDGDVEKAVRIVKEVTEKLSKYEVPPEKLVIHEQITRDLKDYKATGPHVAVAKRLAARGVKIRPGTVISYIVLKGSGRIGDRAIPFDEFDPTKHKYDAEYYIENQVLPAVERILRAFGYRKEDLRYQKTRQVGLSAWLKPKGT

SEQ ID NO: 2786 - protein, 774 aa, synthetic construct
MILDTDMITEDGKPVLRIFKKENGEFKIEYDRTFESYFYALLKDDSAIEEVKKITAERHGTVVTVKRVEKVQKKFLGRPVEVWKLYFTHPQDIPAIRDKIREHPAVIDIYEYDIPFAKRYLIDKGLVPMEGDEELKMLAFDIETLYHEGEEFAEGPILMISYADEEGARVITWKNVDLPYVDVVSTEREMIKRFLRVVKEKDPDVLITYNGDNFDFAYLKKRCEKLGINFALGRDGSEPKIQRMGDRFAVEVKGRIHFDLYPVIRRTINLPTYTLEAVYEAVFGQPKEKVYAEEITTAWETGENLERVARYSMEDAKVTYELGKEFLPMEAQLSRLIGQSLWDVSRSSTGNLVEWFLLRKAYERNELAPNKPDEKELARRRQSYEGGYVKEPERGLWENIVYLDFRSLYPSIIITHNVSPDTLNREGCKEYDVAPQVGHRFCKDFPGFIPSLLGDLLEERQKIKKKMKATIDPIERKLLDYRQRAIKILANSYYGYYGYARARWYCKECAESVTAWGREYITMTIKEIEEKYGFKVIYSDTDGFFATIPGADAETVKKKAMEFLKYINAKLPGALELEYEGFYKRGFFVTKKKYAVIDEEGKITTRGLEIVRRDWSEIAKETQARVLEALLKDGDVEKAVRIVKEVTEKLSKYEVPPEKLVIHEQITRDLKDYKATGPHVAVAKRLAARGVKIRPGTVISYIVLKGSGRIGDRAIPFDEFDPTKHKYDAEYYIENQVLPAVERILRAFGYRKEDLRYQKTRQVGLSAWLKPKGT

SEQ ID NO: 2787 - protein, 774 aa, synthetic construct
MILDTDMITEDGKPVLRIFKKENGEFKIEYDRTFESYFYALLKDDSAIEEVKKITAERHGTVVTVKRVEKVQKKFLGRPVEVWKLYFTHPQDIPAIADKIREHPAVIDIYEYDIPFAKRYLIDKGLVPMEGDEELKMLAFDIETLYHEGEEFAEGPILMISYADEEGARVITWKNVDLPYVDVVSTEREMIKRFLRVVKEKDPDVLITYNGDNFDFAYLKKRCEKLGINFALGRDGSEPKIQRMGDRFAVEVKGRIHFDLYPVIRRTINLPTYTLEAVYEAVFGQPKEKVYAEEITTAWETGENLERVARYSMEDAKVTYELGKEFLPMEAQLSRLIGQSLWDVSRSSTGNLVEWFLLRKAYERNELAPNKPDEKELARRRQSYEGGYVKEPERGLWENIVYLDFRSLYPSIIITHNVSPDTLNREGCKEYDVAPQVGHRFCKDFPGFIPSLLGDLLEERQKIKKKMKATIDPIERKLLDYRQRAIKILANSYYGYYGYARARWYCKECAESVTAWGREYITMTIKEIEEKYGFKVIYSDTDGFFATIPGADAETVKKKAMEFLKYINAKLPGALELEYEGFYKRGFFVTKKKYAVIDEEGKITTRGLEIVRRDWSEIAKETQARVLEALLKDGDVEKAVRIVKEVTEKLSKYEVPPEKLVIHEQITRDLKDYKATGPHVAVAKRLAARGVKIRPGTVISYIVLKGSGRIGDRAIPFDEFDPTKHKYDAEYYIENQVLPAVERILRAFGYRKEDLRYQKTRQVGLSAWLKPKGT

SEQ ID NO: 2788 - protein, 774 aa, synthetic construct
MILDTDMITEDGKPVLRIFKKENGEFKIEYDRTFESYFYALLKDDSAIEEVKKITAERHGTVVTVKRVEKVQKKFLGRPVEVWKLYFTHPQDIPAIHDKIREHPAVIDIYEYDIPFAKRYLIDKGLVPMEGDEELKMLAFDIETLYHEGEEFAEGPILMISYADEEGARVITWKNVDLPYVDVVSTEREMIKRFLRVVKEKDPDVLITYNGDNFDFAYLKKRCEKLGINFALGRDGSEPKIQRMGDRFAVEVKGRIHFDLYPVIRRTINLPTYTLEAVYEAVFGQPKEKVYAEEITTAWETGENLERVARYSMEDAKVTYELGKEFLPMEAQLSRLIGQSLWDVSRSSTGNLVEWFLLRKAYERNELAPNKPDEKELARRRQSYEGGYVKEPERGLWENIVYLDFRSLYPSIIITHNVSPDTLNREGCKEYDVAPQVGHRFCKDFPGFIPSLLGDLLEERQKIKKKMKATIDPIERKLLDYRQRAIKILANSYYGYYGYARARWYCKECAESVTAWGREYITMTIKEIEEKYGFKVIYSDTDGFFATIPGADAETVKKKAMEFLKYINAKLPGALELEYEGFYKRGFFVTKKKYAVIDEEGKITTRGLEIVRRDWSEIAKETQARVLEALLKDGDVEKAVRIVKEVTEKLSKYEVPPEKLVIHEQITRDLKDYKATGPHVAVAKRLAARGVKIRPGTVISYIVLKGSGRIGDRAIPFDEFDPTKHKYDAEYYIENQVLPAVERILRAFGYRKEDLRYQKTRQVGLSAWLKPKGT

SEQ ID NO: 2789 - protein, 774 aa, synthetic construct
MILDTDMITEDGKPVLRIFKKENGEFKIEYDRTFEWYFYALLKDDSAIEEVKKITAERHGTVVTVKRVEKVQKKFLGRPVEVWKLYFTHPQDVPAIRDKIREHPAVIDIYEYDIPFAKRYLIDKGLVPMEGDEELKMLAFDIETLYHEGEEFAEGPILMISYADEEGARVITWKNVDLPYVDVVSTEREMIKRFLRVVKEKDPDVLITYNGDNFDFAYLKKRCEKLGINFALGRDGSEPKIQRMGDRFAVEVKGRIHFDLYPVIRRTINLPTYTLEAVYEAVFGQPKEKVYAEEITTAWETGENLERVARYSMEDAKVTYELGKEFLPMEAQLSRLIGQSLWDVSRSSTGNLVEWFLLRKAYERNELAPNKPDEKELARRRQSYEGGYVKEPERGLWENIVYLDFRSLYPSIIITHNVSPDTLNREGCKEYDVAPQVGHRFCKDFPGFIPSLLGDLLEERQKIKKKMKATIDPIERKLLDYRQRAIKILANSYYGYYGYARARWYCKECAESVTAWGREYITMTIKEIEEKYGFKVIYSDTDGFFATIPGADAETVKKKAMEFLKYINAKLPGALELEYEGFYKRGFFVTKKKYAVIDEEGKITTRGLEIVRRDWSEIAKETQARVLEALLKDGDVEKAVRIVKEVTEKLSKYEVPPEKLVIHEQITRDLKDYKATGPHVAVAKRLAARGVKIRPGTVISYIVLKGSGRIGDRAIPFDEFDPTKHKYDAEYYIENQVLPAVERILRAFGYRKEDLRYQKTRQVGLSAWLKPKGT

SEQ ID NO: 2790 - protein, 774 aa, synthetic construct
MILDTDMITEDGKPVLRIFKKENGEFKIEYDRTFEWYFYALLKDDSAIEEVKKITAERHGTVVTVKRVEKVQKKFLGRPVEVWKLYFTHFQDVPAIRDKIREHPAVIDIYEYDIPFAKRYLIDKGLVPMEGDEELKMLAFDIETLYHEGEEFAEGPILMISYADEEGARVITWKNVDLPYVDVVSTEREMIKRFLRVVKEKDPDVLITYNGDNFDFAYLKKRCEKLGINFALGRDGSEPKIQRMGDRFAVEVKGRIHFDLYPVIRRTINLPTYTLEAVYEAVFGQPKEKVYAEEITTAWETGENLERVARYSMEDAKVTYELGKEFLPMEAQLSRLIGQSLWDVSRSSTGNLVEWFLLRKAYERNELAPNKPDEKELARRRQSYEGGYVKEPERGLWENIVYLDFRSLYPSIIITHNVSPDTLNREGCKEYDVAPQVGHRFCKDFPGFIPSLLGDLLEERQKIKKKMKATIDPIERKLLDYRQRAIKILANSYYGYYGYARARWYCKECAESVTAWGREYITMTIKEIEEKYGFKVIYSDTDGFFATIPGADAETVKKKAMEFLKYINAKLPGALELEYEGFYKRGFFVTKKKYAVIDEEGKITTRGLEIVRRDWSEIAKETQARVLEALLKDGDVEKAVRIVKEVTEKLSKYEVPPEKLVIHEQITRDLKDYKATGPHVAVAKRLAARGVKIRPGTVISYIVLKGSGRIGDRAIPFDEFDPTKHKYDAEYYIENQVLPAVERILRAFGYRKEDLRYQKTRQVGLSAWLKPKGT

SEQ ID NO: 2791 - protein, 774 aa, synthetic construct
MILDTDMITEDGKPVLRIFKKENGEFKIEYDRTFEWYFYALLKDDSAIEEVKKITAERHGTVVTVKRVEKVQKKFLGRPVEVWKLYFTHFQDIPAIRDKIREHPAVIDIYEYDIPFAKRYLIDKGLVPMEGDEELKMLAFDIETLYHEGEEFAEGPILMISYADEEGARVITWKNVDLPYVDVVSTEREMIKRFLRVVKEKDPDVLITYNGDNFDFAYLKKRCEKLGINFALGRDGSEPKIQRMGDRFAVEVKGRIHFDLYPVIRRTINLPTYTLEAVYEAVFGQPKEKVYAEEITTAWETGENLERVARYSMEDAKVTYELGKEFLPMEAQLSRLIGQSLWDVSRSSTGNLVEWFLLRKAYERNELAPNKPDEKELARRRQSYEGGYVKEPERGLWENIVYLDFRSLYPSIIITHNVSPDTLNREGCKEYDVAPQVGHRFCKDFPGFIPSLLGDLLEERQKIKKKMKATIDPIERKLLDYRQRAIKILANSYYGYYGYARARWYCKECAESVTAWGREYITMTIKEIEEKYGFKVIYSDTDGFFATIPGADAETVKKKAMEFLKYINAKLPGALELEYEGFYKRGFFVTKKKYAVIDEEGKITTRGLEIVRRDWSEIAKETQARVLEALLKDGDVEKAVRIVKEVTEKLSKYEVPPEKLVIHEQITRDLKDYKATGPHVAVAKRLAARGVKIRPGTVISYIVLKGSGRIGDRAIPFDEFDPTKHKYDAEYYIENQVLPAVERILRAFGYRKEDLRYQKTRQVGLSAWLKPKGT

SEQ ID NO: 2792 - protein, 774 aa, synthetic construct
MILDTDMITEDGKPVLRIFKKENGEFKIEYDRTFEWYFYALLKDDSAIEEVKKITAERHGTVVTVKRVEKVQKKFLGRPVEVWKLYFTHFQDIPAIADKIREHPAVIDIYEYDIPFAKRYLIDKGLVPMEGDEELKMLAFDIETLYHEGEEFAEGPILMISYADEEGARVITWKNVDLPYVDVVSTEREMIKRFLRVVKEKDPDVLITYNGDNFDFAYLKKRCEKLGINFALGRDGSEPKIQRMGDRFAVEVKGRIHFDLYPVIRRTINLPTYTLEAVYEAVFGQPKEKVYAEEITTAWETGENLERVARYSMEDAKVTYELGKEFLPMEAQLSRLIGQSLWDVSRSSTGNLVEWFLLRKAYERNELAPNKPDEKELARRRQSYEGGYVKEPERGLWENIVYLDFRSLYPSIIITHNVSPDTLNREGCKEYDVAPQVGHRFCKDFPGFIPSLLGDLLEERQKIKKKMKATIDPIERKLLDYRQRAIKILANSYYGYYGYARARWYCKECAESVTAWGREYITMTIKEIEEKYGFKVIYSDTDGFFATIPGADAETVKKKAMEFLKYINAKLPGALELEYEGFYKRGFFVTKKKYAVIDEEGKITTRGLEIVRRDWSEIAKETQARVLEALLKDGDVEKAVRIVKEVTEKLSKYEVPPEKLVIHEQITRDLKDYKATGPHVAVAKRLAARGVKIRPGTVISYIVLKGSGRIGDRAIPFDEFDPTKHKYDAEYYIENQVLPAVERILRAFGYRKEDLRYQKTRQVGLSAWLKPKGT

SEQ ID NO: 2793 - protein, 774 aa, synthetic construct
MILDTDMITEDGKPVLRIFKKENGEFKIEYDRTFEWYFYALLKDDSAIEEVKKITAERHGTVVTVKRVEKVQKKFLGRPVEVWKLYFTHIQDIPAIRDKIREHPAVIDIYEYDIPFAKRYLIDKGLVPMEGDEELKMLAFDIETLYHEGEEFAEGPILMISYADEEGARVITWKNVDLPYVDVVSTEREMIKRFLRVVKEKDPDVLITYNGDNFDFAYLKKRCEKLGINFALGRDGSEPKIQRMGDRFAVEVKGRIHFDLYPVIRRTINLPTYTLEAVYEAVFGQPKEKVYAEEITTAWETGENLERVARYSMEDAKVTYELGKEFLPMEAQLSRLIGQSLWDVSRSSTGNLVEWFLLRKAYERNELAPNKPDEKELARRRQSYEGGYVKEPERGLWENIVYLDFRSLYPSIIITHNVSPDTLNREGCKEYDVAPQVGHRFCKDFPGFIPSLLGDLLEERQKIKKKMKATIDPIERKLLDYRQRAIKILANSYYGYYGYARARWYCKECAESVTAWGREYITMTIKEIEEKYGFKVIYSDTDGFFATIPGADAETVKKKAMEFLKYINAKLPGALELEYEGFYKRGFFVTKKKYAVIDEEGKITTRGLEIVRRDWSEIAKETQARVLEALLKDGDVEKAVRIVKEVTEKLSKYEVPPEKLVIHEQITRDLKDYKATGPHVAVAKRLAARGVKIRPGTVISYIVLKGSGRIGDRAIPFDEFDPTKHKYDAEYYIENQVLPAVERILRAFGYRKEDLRYQKTRQVGLSAWLKPKGT

SEQ ID NO: 2794 - protein, 774 aa, synthetic construct
MILDTDMITEDGKPVLRIFKKENGEFKIEYDRTFEWYFYALLKDDSAIEEVKKITAERHGTVVTVKRVEKVQKKFLGRPVEVWKLYFTHWQDVPAIRDKIREHPAVIDIYEYDIPFAKRYLIDKGLVPMEGDEELKMLAFDIETLYHEGEEFAEGPILMISYADEEGARVITWKNVDLPYVDVVSTEREMIKRFLRVVKEKDPDVLITYNGDNFDFAYLKKRCEKLGINFALGRDGSEPKIQRMGDRFAVEVKGRIHFDLYPVIRRTINLPTYTLEAVYEAVFGQPKEKVYAEEITTAWETGENLERVARYSMEDAKVTYELGKEFLPMEAQLSRLIGQSLWDVSRSSTGNLVEWFLLRKAYERNELAPNKPDEKELARRRQSYEGGYVKEPERGLWENIVYLDFRSLYPSIIITHNVSPDTLNREGCKEYDVAPQVGHRFCKDFPGFIPSLLGDLLEERQKIKKKMKATIDPIERKLLDYRQRAIKILANSYYGYYGYARARWYCKECAESVTAWGREYITMTIKEIEEKYGFKVIYSDTDGFFATIPGADAETVKKKAMEFLKYINAKLPGALELEYEGFYKRGFFVTKKKYAVIDEEGKITTRGLEIVRRDWSEIAKETQARVLEALLKDGDVEKAVRIVKEVTEKLSKYEVPPEKLVIHEQITRDLKDYKATGPHVAVAKRLAARGVKIRPGTVISYIVLKGSGRIGDRAIPFDEFDPTKHKYDAEYYIENQVLPAVERILRAFGYRKEDLRYQKTRQVGLSAWLKPKGT

SEQ ID NO: 2795 - protein, 774 aa, synthetic construct
MILDTDMITEDGKPVLRIFKKENGEFKIEYDRTFEWYFYALLKDDSAIEEVKKITAERHGTVVTVKRVEKVQKKFLGRPVEVWKLYFTHWQDVPAIADKIREHPAVIDIYEYDIPFAKRYLIDKGLVPMEGDEELKMLAFDIETLYHEGEEFAEGPILMISYADEEGARVITWKNVDLPYVDVVSTEREMIKRFLRVVKEKDPDVLITYNGDNFDFAYLKKRCEKLGINFALGRDGSEPKIQRMGDRFAVEVKGRIHFDLYPVIRRTINLPTYTLEAVYEAVFGQPKEKVYAEEITTAWETGENLERVARYSMEDAKVTYELGKEFLPMEAQLSRLIGQSLWDVSRSSTGNLVEWFLLRKAYERNELAPNKPDEKELARRRQSYEGGYVKEPERGLWENIVYLDFRSLYPSIIITHNVSPDTLNREGCKEYDVAPQVGHRFCKDFPGFIPSLLGDLLEERQKIKKKMKATIDPIERKLLDYRQRAIKILANSYYGYYGYARARWYCKECAESVTAWGREYITMTIKEIEEKYGFKVIYSDTDGFFATIPGADAETVKKKAMEFLKYINAKLPGALELEYEGFYKRGFFVTKKKYAVIDEEGKITTRGLEIVRRDWSEIAKETQARVLEALLKDGDVEKAVRIVKEVTEKLSKYEVPPEKLVIHEQITRDLKDYKATGPHVAVAKRLAARGVKIRPGTVISYIVLKGSGRIGDRAIPFDEFDPTKHKYDAEYYIENQVLPAVERILRAFGYRKEDLRYQKTRQVGLSAWLKPKGT

SEQ ID NO: 2796 - protein, 774 aa, synthetic construct
MILDTDMITEDGKPVLRIFKKENGEFKIEYDRTFEWYFYALLKDDSAIEEVKKITAERHGTVVTVKRVEKVQKKFLGRPVEVWKLYFTHWQDVPAIHDKIREHPAVIDIYEYDIPFAKRYLIDKGLVPMEGDEELKMLAFDIETLYHEGEEFAEGPILMISYADEEGARVITWKNVDLPYVDVVSTEREMIKRFLRVVKEKDPDVLITYNGDNFDFAYLKKRCEKLGINFALGRDGSEPKIQRMGDRFAVEVKGRIHFDLYPVIRRTINLPTYTLEAVYEAVFGQPKEKVYAEEITTAWETGENLERVARYSMEDAKVTYELGKEFLPMEAQLSRLIGQSLWDVSRSSTGNLVEWFLLRKAYERNELAPNKPDEKELARRRQSYEGGYVKEPERGLWENIVYLDFRSLYPSIIITHNVSPDTLNREGCKEYDVAPQVGHRFCKDFPGFIPSLLGDLLEERQKIKKKMKATIDPIERKLLDYRQRAIKILANSYYGYYGYARARWYCKECAESVTAWGREYITMTIKEIEEKYGFKVIYSDTDGFFATIPGADAETVKKKAMEFLKYINAKLPGALELEYEGFYKRGFFVTKKKYAVIDEEGKITTRGLEIVRRDWSEIAKETQARVLEALLKDGDVEKAVRIVKEVTEKLSKYEVPPEKLVIHEQITRDLKDYKATGPHVAVAKRLAARGVKIRPGTVISYIVLKGSGRIGDRAIPFDEFDPTKHKYDAEYYIENQVLPAVERILRAFGYRKEDLRYQKTRQVGLSAWLKPKGT

SEQ ID NO: 2797 - protein, 774 aa, synthetic construct
MILDTDMITEDGKPVLRIFKKENGEFKIEYDRTFEWYFYALLKDDSAIEEVKKITAERHGTVVTVKRVEKVQKKFLGRPVEVWKLYFTHWQDIPAIRDKIREHPAVIDIYEYDIPFAKRYLIDKGLVPMEGDEELKMLAFDIETLYHEGEEFAEGPILMISYADEEGARVITWKNVDLPYVDVVSTEREMIKRFLRVVKEKDPDVLITYNGDNFDFAYLKKRCEKLGINFALGRDGSEPKIQRMGDRFAVEVKGRIHFDLYPVIRRTINLPTYTLEAVYEAVFGQPKEKVYAEEITTAWETGENLERVARYSMEDAKVTYELGKEFLPMEAQLSRLIGQSLWDVSRSSTGNLVEWFLLRKAYERNELAPNKPDEKELARRRQSYEGGYVKEPERGLWENIVYLDFRSLYPSIIITHNVSPDTLNREGCKEYDVAPQVGHRFCKDFPGFIPSLLGDLLEERQKIKKKMKATIDPIERKLLDYRQRAIKILANSYYGYYGYARARWYCKECAESVTAWGREYITMTIKEIEEKYGFKVIYSDTDGFFATIPGADAETVKKKAMEFLKYINAKLPGALELEYEGFYKRGFFVTKKKYAVIDEEGKITTRGLEIVRRDWSEIAKETQARVLEALLKDGDVEKAVRIVKEVTEKLSKYEVPPEKLVIHEQITRDLKDYKATGPHVAVAKRLAARGVKIRPGTVISYIVLKGSGRIGDRAIPFDEFDPTKHKYDAEYYIENQVLPAVERILRAFGYRKEDLRYQKTRQVGLSAWLKPKGT

SEQ ID NO: 2798 - protein, 774 aa, synthetic construct
MILDTDMITEDGKPVLRIFKKENGEFKIEYDRTFEWYFYALLKDDSAIEEVKKITAERHGTVVTVKRVEKVQKKFLGRPVEVWKLYFTHYQDVPAIRDKIREHPAVIDIYEYDIPFAKRYLIDKGLVPMEGDEELKMLAFDIETLYHEGEEFAEGPILMISYADEEGARVITWKNVDLPYVDVVSTEREMIKRFLRVVKEKDPDVLITYNGDNFDFAYLKKRCEKLGINFALGRDGSEPKIQRMGDRFAVEVKGRIHFDLYPVIRRTINLPTYTLEAVYEAVFGQPKEKVYAEEITTAWETGENLERVARYSMEDAKVTYELGKEFLPMEAQLSRLIGQSLWDVSRSSTGNLVEWFLLRKAYERNELAPNKPDEKELARRRQSYEGGYVKEPERGLWENIVYLDFRSLYPSIIITHNVSPDTLNREGCKEYDVAPQVGHRFCKDFPGFIPSLLGDLLEERQKIKKKMKATIDPIERKLLDYRQRAIKILANSYYGYYGYARARWYCKECAESVTAWGREYITMTIKEIEEKYGFKVIYSDTDGFFATIPGADAETVKKKAMEFLKYINAKLPGALELEYEGFYKRGFFVTKKKYAVIDEEGKITTRGLEIVRRDWSEIAKETQARVLEALLKDGDVEKAVRIVKEVTEKLSKYEVPPEKLVIHEQITRDLKDYKATGPHVAVAKRLAARGVKIRPGTVISYIVLKGSGRIGDRAIPFDEFDPTKHKYDAEYYIENQVLPAVERILRAFGYRKEDLRYQKTRQVGLSAWLKPKGT

SEQ ID NO: 2799 - protein, 774 aa, synthetic construct
MILDTDMITEDGKPVLRIFKKENGEFKIEYDRTFEWYFYALLKDDSAIEEVKKITAERHGTVVTVKRVEKVQKKFLGRPVEVWKLYFTHYQDIPAIRDKIREHPAVIDIYEYDIPFAKRYLIDKGLVPMEGDEELKMLAFDIETLYHEGEEFAEGPILMISYADEEGARVITWKNVDLPYVDVVSTEREMIKRFLRVVKEKDPDVLITYNGDNFDFAYLKKRCEKLGINFALGRDGSEPKIQRMGDRFAVEVKGRIHFDLYPVIRRTINLPTYTLEAVYEAVFGQPKEKVYAEEITTAWETGENLERVARYSMEDAKVTYELGKEFLPMEAQLSRLIGQSLWDVSRSSTGNLVEWFLLRKAYERNELAPNKPDEKELARRRQSYEGGYVKEPERGLWENIVYLDFRSLYPSIIITHNVSPDTLNREGCKEYDVAPQVGHRFCKDFPGFIPSLLGDLLEERQKIKKKMKATIDPIERKLLDYRQRAIKILANSYYGYYGYARARWYCKECAESVTAWGREYITMTIKEIEEKYGFKVIYSDTDGFFATIPGADAETVKKKAMEFLKYINAKLPGALELEYEGFYKRGFFVTKKKYAVIDEEGKITTRGLEIVRRDWSEIAKETQARVLEALLKDGDVEKAVRIVKEVTEKLSKYEVPPEKLVIHEQITRDLKDYKATGPHVAVAKRLAARGVKIRPGTVISYIVLKGSGRIGDRAIPFDEFDPTKHKYDAEYYIENQVLPAVERILRAFGYRKEDLRYQKTRQVGLSAWLKPKGT

SEQ ID NO: 2800 - protein, 774 aa, synthetic construct
MILDTDMITEDGKPVLRIFKKENGEFKIEYDRTFEWYFYALLKDDSAIEEVKKITAERHGTVVTVKRVEKVQKKFLGRPVEVWKLYFTHYQDIPAIADKIREHPAVIDIYEYDIPFAKRYLIDKGLVPMEGDEELKMLAFDIETLYHEGEEFAEGPILMISYADEEGARVITWKNVDLPYVDVVSTEREMIKRFLRVVKEKDPDVLITYNGDNFDFAYLKKRCEKLGINFALGRDGSEPKIQRMGDRFAVEVKGRIHFDLYPVIRRTINLPTYTLEAVYEAVFGQPKEKVYAEEITTAWETGENLERVARYSMEDAKVTYELGKEFLPMEAQLSRLIGQSLWDVSRSSTGNLVEWFLLRKAYERNELAPNKPDEKELARRRQSYEGGYVKEPERGLWENIVYLDFRSLYPSIIITHNVSPDTLNREGCKEYDVAPQVGHRFCKDFPGFIPSLLGDLLEERQKIKKKMKATIDPIERKLLDYRQRAIKILANSYYGYYGYARARWYCKECAESVTAWGREYITMTIKEIEEKYGFKVIYSDTDGFFATIPGADAETVKKKAMEFLKYINAKLPGALELEYEGFYKRGFFVTKKKYAVIDEEGKITTRGLEIVRRDWSEIAKETQARVLEALLKDGDVEKAVRIVKEVTEKLSKYEVPPEKLVIHEQITRDLKDYKATGPHVAVAKRLAARGVKIRPGTVISYIVLKGSGRIGDRAIPFDEFDPTKHKYDAEYYIENQVLPAVERILRAFGYRKEDLRYQKTRQVGLSAWLKPKGT

SEQ ID NO: 2801 - protein, 774 aa, synthetic construct
MILDTDMITEDGKPVLRIFKKENGEFKIEYDRTFEWYFYALLKDDSAIEEVKKITAERHGTVVTVKRVEKVQKKFLGRPVEVWKLYFTHYQDIPAIHDKIREHPAVIDIYEYDIPFAKRYLIDKGLVPMEGDEELKMLAFDIETLYHEGEEFAEGPILMISYADEEGARVITWKNVDLPYVDVVSTEREMIKRFLRVVKEKDPDVLITYNGDNFDFAYLKKRCEKLGINFALGRDGSEPKIQRMGDRFAVEVKGRIHFDLYPVIRRTINLPTYTLEAVYEAVFGQPKEKVYAEEITTAWETGENLERVARYSMEDAKVTYELGKEFLPMEAQLSRLIGQSLWDVSRSSTGNLVEWFLLRKAYERNELAPNKPDEKELARRRQSYEGGYVKEPERGLWENIVYLDFRSLYPSIIITHNVSPDTLNREGCKEYDVAPQVGHRFCKDFPGFIPSLLGDLLEERQKIKKKMKATIDPIERKLLDYRQRAIKILANSYYGYYGYARARWYCKECAESVTAWGREYITMTIKEIEEKYGFKVIYSDTDGFFATIPGADAETVKKKAMEFLKYINAKLPGALELEYEGFYKRGFFVTKKKYAVIDEEGKITTRGLEIVRRDWSEIAKETQARVLEALLKDGDVEKAVRIVKEVTEKLSKYEVPPEKLVIHEQITRDLKDYKATGPHVAVAKRLAARGVKIRPGTVISYIVLKGSGRIGDRAIPFDEFDPTKHKYDAEYYIENQVLPAVERILRAFGYRKEDLRYQKTRQVGLSAWLKPKGT

SEQ ID NO: 2802 - protein, 774 aa, synthetic construct
MILDTDMITEDGKPVLRIFKKENGEFKIEYDRTFEWYFYALLKDDSAIEEVKKITAERHGTVVTVKRVEKVQKKFLGRPVEVWKLYFTHPQDVPAIADKIREHPAVIDIYEYDIPFAKRYLIDKGLVPMEGDEELKMLAFDIETLYHEGEEFAEGPILMISYADEEGARVITWKNVDLPYVDVVSTEREMIKRFLRVVKEKDPDVLITYNGDNFDFAYLKKRCEKLGINFALGRDGSEPKIQRMGDRFAVEVKGRIHFDLYPVIRRTINLPTYTLEAVYEAVFGQPKEKVYAEEITTAWETGENLERVARYSMEDAKVTYELGKEFLPMEAQLSRLIGQSLWDVSRSSTGNLVEWFLLRKAYERNELAPNKPDEKELARRRQSYEGGYVKEPERGLWENIVYLDFRSLYPSIIITHNVSPDTLNREGCKEYDVAPQVGHRFCKDFPGFIPSLLGDLLEERQKIKKKMKATIDPIERKLLDYRQRAIKILANSYYGYYGYARARWYCKECAESVTAWGREYITMTIKEIEEKYGFKVIYSDTDGFFATIPGADAETVKKKAMEFLKYINAKLPGALELEYEGFYKRGFFVTKKKYAVIDEEGKITTRGLEIVRRDWSEIAKETQARVLEALLKDGDVEKAVRIVKEVTEKLSKYEVPPEKLVIHEQITRDLKDYKATGPHVAVAKRLAARGVKIRPGTVISYIVLKGSGRIGDRAIPFDEFDPTKHKYDAEYYIENQVLPAVERILRAFGYRKEDLRYQKTRQVGLSAWLKPKGT

SEQ ID NO: 2803 - protein, 774 aa, synthetic construct
MILDTDMITEDGKPVLRIFKKENGEFKIEYDRTFEWYFYALLKDDSAIEEVKKITAERHGTVVTVKRVEKVQKKFLGRPVEVWKLYFTHPQDVPAIFDKIREHPAVIDIYEYDIPFAKRYLIDKGLVPMEGDEELKMLAFDIETLYHEGEEFAEGPILMISYADEEGARVITWKNVDLPYVDVVSTEREMIKRFLRVVKEKDPDVLITYNGDNFDFAYLKKRCEKLGINFALGRDGSEPKIQRMGDRFAVEVKGRIHFDLYPVIRRTINLPTYTLEAVYEAVFGQPKEKVYAEEITTAWETGENLERVARYSMEDAKVTYELGKEFLPMEAQLSRLIGQSLWDVSRSSTGNLVEWFLLRKAYERNELAPNKPDEKELARRRQSYEGGYVKEPERGLWENIVYLDFRSLYPSIIITHNVSPDTLNREGCKEYDVAPQVGHRFCKDFPGFIPSLLGDLLEERQKIKKKMKATIDPIERKLLDYRQRAIKILANSYYGYYGYARARWYCKECAESVTAWGREYITMTIKEIEEKYGFKVIYSDTDGFFATIPGADAETVKKKAMEFLKYINAKLPGALELEYEGFYKRGFFVTKKKYAVIDEEGKITTRGLEIVRRDWSEIAKETQARVLEALLKDGDVEKAVRIVKEVTEKLSKYEVPPEKLVIHEQITRDLKDYKATGPHVAVAKRLAARGVKIRPGTVISYIVLKGSGRIGDRAIPFDEFDPTKHKYDAEYYIENQVLPAVERILRAFGYRKEDLRYQKTRQVGLSAWLKPKGT

SEQ ID NO: 2804 - protein, 774 aa, synthetic construct
MILDTDMITEDGKPVLRIFKKENGEFKIEYDRTFEWYFYALLKDDSAIEEVKKITAERHGTVVTVKRVEKVQKKFLGRPVEVWKLYFTHPQDVPAIHDKIREHPAVIDIYEYDIPFAKRYLIDKGLVPMEGDEELKMLAFDIETLYHEGEEFAEGPILMISYADEEGARVITWKNVDLPYVDVVSTEREMIKRFLRVVKEKDPDVLITYNGDNFDFAYLKKRCEKLGINFALGRDGSEPKIQRMGDRFAVEVKGRIHFDLYPVIRRTINLPTYTLEAVYEAVFGQPKEKVYAEEITTAWETGENLERVARYSMEDAKVTYELGKEFLPMEAQLSRLIGQSLWDVSRSSTGNLVEWFLLRKAYERNELAPNKPDEKELARRRQSYEGGYVKEPERGLWENIVYLDFRSLYPSIIITHNVSPDTLNREGCKEYDVAPQVGHRFCKDFPGFIPSLLGDLLEERQKIKKKMKATIDPIERKLLDYRQRAIKILANSYYGYYGYARARWYCKECAESVTAWGREYITMTIKEIEEKYGFKVIYSDTDGFFATIPGADAETVKKKAMEFLKYINAKLPGALELEYEGFYKRGFFVTKKKYAVIDEEGKITTRGLEIVRRDWSEIAKETQARVLEALLKDGDVEKAVRIVKEVTEKLSKYEVPPEKLVIHEQITRDLKDYKATGPHVAVAKRLAARGVKIRPGTVISYIVLKGSGRIGDRAIPFDEFDPTKHKYDAEYYIENQVLPAVERILRAFGYRKEDLRYQKTRQVGLSAWLKPKGT

SEQ ID NO: 2805 - protein, 774 aa, synthetic construct
MILDTDMITEDGKPVLRIFKKENGEFKIEYDRTFEWYFYALLKDDSAIEEVKKITAERHGTVVTVKRVEKVQKKFLGRPVEVWKLYFTHPQDVPAIWDKIREHPAVIDIYEYDIPFAKRYLIDKGLVPMEGDEELKMLAFDIETLYHEGEEFAEGPILMISYADEEGARVITWKNVDLPYVDVVSTEREMIKRFLRVVKEKDPDVLITYNGDNFDFAYLKKRCEKLGINFALGRDGSEPKIQRMGDRFAVEVKGRIHFDLYPVIRRTINLPTYTLEAVYEAVFGQPKEKVYAEEITTAWETGENLERVARYSMEDAKVTYELGKEFLPMEAQLSRLIGQSLWDVSRSSTGNLVEWFLLRKAYERNELAPNKPDEKELARRRQSYEGGYVKEPERGLWENIVYLDFRSLYPSIIITHNVSPDTLNREGCKEYDVAPQVGHRFCKDFPGFIPSLLGDLLEERQKIKKKMKATIDPIERKLLDYRQRAIKILANSYYGYYGYARARWYCKECAESVTAWGREYITMTIKEIEEKYGFKVIYSDTDGFFATIPGADAETVKKKAMEFLKYINAKLPGALELEYEGFYKRGFFVTKKKYAVIDEEGKITTRGLEIVRRDWSEIAKETQARVLEALLKDGDVEKAVRIVKEVTEKLSKYEVPPEKLVIHEQITRDLKDYKATGPHVAVAKRLAARGVKIRPGTVISYIVLKGSGRIGDRAIPFDEFDPTKHKYDAEYYIENQVLPAVERILRAFGYRKEDLRYQKTRQVGLSAWLKPKGT

SEQ ID NO: 2806 - protein, 774 aa, synthetic construct
MILDTDMITEDGKPVLRIFKKENGEFKIEYDRTFEWYFYALLKDDSAIEEVKKITAERHGTVVTVKRVEKVQKKFLGRPVEVWKLYFTHPQDIPAIRDKIREHPAVIDIYEYDIPFAKRYLIDKGLVPMEGDEELKMLAFDIETLYHEGEEFAEGPILMISYADEEGARVITWKNVDLPYVDVVSTEREMIKRFLRVVKEKDPDVLITYNGDNFDFAYLKKRCEKLGINFALGRDGSEPKIQRMGDRFAVEVKGRIHFDLYPVIRRTINLPTYTLEAVYEAVFGQPKEKVYAEEITTAWETGENLERVARYSMEDAKVTYELGKEFLPMEAQLSRLIGQSLWDVSRSSTGNLVEWFLLRKAYERNELAPNKPDEKELARRRQSYEGGYVKEPERGLWENIVYLDFRSLYPSIIITHNVSPDTLNREGCKEYDVAPQVGHRFCKDFPGFIPSLLGDLLEERQKIKKKMKATIDPIERKLLDYRQRAIKILANSYYGYYGYARARWYCKECAESVTAWGREYITMTIKEIEEKYGFKVIYSDTDGFFATIPGADAETVKKKAMEFLKYINAKLPGALELEYEGFYKRGFFVTKKKYAVIDEEGKITTRGLEIVRRDWSEIAKETQARVLEALLKDGDVEKAVRIVKEVTEKLSKYEVPPEKLVIHEQITRDLKDYKATGPHVAVAKRLAARGVKIRPGTVISYIVLKGSGRIGDRAIPFDEFDPTKHKYDAEYYIENQVLPAVERILRAFGYRKEDLRYQKTRQVGLSAWLKPKGT

SEQ ID NO: 2807 - protein, 774 aa, synthetic construct
MILDTDMITEDGKPVLRIFKKENGEFKIEYDRTFEWYFYALLKDDSAIEEVKKITAERHGTVVTVKRVEKVQKKFLGRPVEVWKLYFTHPQDIPAIADKIREHPAVIDIYEYDIPFAKRYLIDKGLVPMEGDEELKMLAFDIETLYHEGEEFAEGPILMISYADEEGARVITWKNVDLPYVDVVSTEREMIKRFLRVVKEKDPDVLITYNGDNFDFAYLKKRCEKLGINFALGRDGSEPKIQRMGDRFAVEVKGRIHFDLYPVIRRTINLPTYTLEAVYEAVFGQPKEKVYAEEITTAWETGENLERVARYSMEDAKVTYELGKEFLPMEAQLSRLIGQSLWDVSRSSTGNLVEWFLLRKAYERNELAPNKPDEKELARRRQSYEGGYVKEPERGLWENIVYLDFRSLYPSIIITHNVSPDTLNREGCKEYDVAPQVGHRFCKDFPGFIPSLLGDLLEERQKIKKKMKATIDPIERKLLDYRQRAIKILANSYYGYYGYARARWYCKECAESVTAWGREYITMTIKEIEEKYGFKVIYSDTDGFFATIPGADAETVKKKAMEFLKYINAKLPGALELEYEGFYKRGFFVTKKKYAVIDEEGKITTRGLEIVRRDWSEIAKETQARVLEALLKDGDVEKAVRIVKEVTEKLSKYEVPPEKLVIHEQITRDLKDYKATGPHVAVAKRLAARGVKIRPGTVISYIVLKGSGRIGDRAIPFDEFDPTKHKYDAEYYIENQVLPAVERILRAFGYRKEDLRYQKTRQVGLSAWLKPKGT

SEQ ID NO: 2808 - protein, 774 aa, synthetic construct
MILDTDMITEDGKPVLRIFKKENGEFKIEYDRTFEWYFYALLKDDSAIEEVKKITAERHGTVVTVKRVEKVQKKFLGRPVEVWKLYFTHPQDIPAIFDKIREHPAVIDIYEYDIPFAKRYLIDKGLVPMEGDEELKMLAFDIETLYHEGEEFAEGPILMISYADEEGARVITWKNVDLPYVDVVSTEREMIKRFLRVVKEKDPDVLITYNGDNFDFAYLKKRCEKLGINFALGRDGSEPKIQRMGDRFAVEVKGRIHFDLYPVIRRTINLPTYTLEAVYEAVFGQPKEKVYAEEITTAWETGENLERVARYSMEDAKVTYELGKEFLPMEAQLSRLIGQSLWDVSRSSTGNLVEWFLLRKAYERNELAPNKPDEKELARRRQSYEGGYVKEPERGLWENIVYLDFRSLYPSIIITHNVSPDTLNREGCKEYDVAPQVGHRFCKDFPGFIPSLLGDLLEERQKIKKKMKATIDPIERKLLDYRQRAIKILANSYYGYYGYARARWYCKECAESVTAWGREYITMTIKEIEEKYGFKVIYSDTDGFFATIPGADAETVKKKAMEFLKYINAKLPGALELEYEGFYKRGFFVTKKKYAVIDEEGKITTRGLEIVRRDWSEIAKETQARVLEALLKDGDVEKAVRIVKEVTEKLSKYEVPPEKLVIHEQITRDLKDYKATGPHVAVAKRLAARGVKIRPGTVISYIVLKGSGRIGDRAIPFDEFDPTKHKYDAEYYIENQVLPAVERILRAFGYRKEDLRYQKTRQVGLSAWLKPKGT

SEQ ID NO: 2809 - protein, 774 aa, synthetic construct
MILDTDMITEDGKPVLRIFKKENGEFKIEYDRTFEWYFYALLKDDSAIEEVKKITAERHGTVVTVKRVEKVQKKFLGRPVEVWKLYFTHPQDIPAIHDKIREHPAVIDIYEYDIPFAKRYLIDKGLVPMEGDEELKMLAFDIETLYHEGEEFAEGPILMISYADEEGARVITWKNVDLPYVDVVSTEREMIKRFLRVVKEKDPDVLITYNGDNFDFAYLKKRCEKLGINFALGRDGSEPKIQRMGDRFAVEVKGRIHFDLYPVIRRTINLPTYTLEAVYEAVFGQPKEKVYAEEITTAWETGENLERVARYSMEDAKVTYELGKEFLPMEAQLSRLIGQSLWDVSRSSTGNLVEWFLLRKAYERNELAPNKPDEKELARRRQSYEGGYVKEPERGLWENIVYLDFRSLYPSIIITHNVSPDTLNREGCKEYDVAPQVGHRFCKDFPGFIPSLLGDLLEERQKIKKKMKATIDPIERKLLDYRQRAIKILANSYYGYYGYARARWYCKECAESVTAWGREYITMTIKEIEEKYGFKVIYSDTDGFFATIPGADAETVKKKAMEFLKYINAKLPGALELEYEGFYKRGFFVTKKKYAVIDEEGKITTRGLEIVRRDWSEIAKETQARVLEALLKDGDVEKAVRIVKEVTEKLSKYEVPPEKLVIHEQITRDLKDYKATGPHVAVAKRLAARGVKIRPGTVISYIVLKGSGRIGDRAIPFDEFDPTKHKYDAEYYIENQVLPAVERILRAFGYRKEDLRYQKTRQVGLSAWLKPKGT

SEQ ID NO: 2810 - protein, 774 aa, synthetic construct
MILDTDMITEDGKPVLRIFKKENGEFKIEYDRTFEWYFYALLKDDSAIEEVKKITAERHGTVVTVKRVEKVQKKFLGRPVEVWKLYFTHPQDIPAIWDKIREHPAVIDIYEYDIPFAKRYLIDKGLVPMEGDEELKMLAFDIETLYHEGEEFAEGPILMISYADEEGARVITWKNVDLPYVDVVSTEREMIKRFLRVVKEKDPDVLITYNGDNFDFAYLKKRCEKLGINFALGRDGSEPKIQRMGDRFAVEVKGRIHFDLYPVIRRTINLPTYTLEAVYEAVFGQPKEKVYAEEITTAWETGENLERVARYSMEDAKVTYELGKEFLPMEAQLSRLIGQSLWDVSRSSTGNLVEWFLLRKAYERNELAPNKPDEKELARRRQSYEGGYVKEPERGLWENIVYLDFRSLYPSIIITHNVSPDTLNREGCKEYDVAPQVGHRFCKDFPGFIPSLLGDLLEERQKIKKKMKATIDPIERKLLDYRQRAIKILANSYYGYYGYARARWYCKECAESVTAWGREYITMTIKEIEEKYGFKVIYSDTDGFFATIPGADAETVKKKAMEFLKYINAKLPGALELEYEGFYKRGFFVTKKKYAVIDEEGKITTRGLEIVRRDWSEIAKETQARVLEALLKDGDVEKAVRIVKEVTEKLSKYEVPPEKLVIHEQITRDLKDYKATGPHVAVAKRLAARGVKIRPGTVISYIVLKGSGRIGDRAIPFDEFDPTKHKYDAEYYIENQVLPAVERILRAFGYRKEDLRYQKTRQVGLSAWLKPKGT

SEQ ID NO: 2811 - protein, 774 aa, synthetic construct
MILDTDMITEDGKPVLRIFKKENGEFKIEYDRTFEWYFYALLKDDSAIEEVKKITAERHGTVVTVKRVEKVQKKFLGRPVEVWKLYFTHPQDQPAIRDKIREHPAVIDIYEYDIPFAKRYLIDKGLVPMEGDEELKMLAFDIETLYHEGEEFAEGPILMISYADEEGARVITWKNVDLPYVDVVSTEREMIKRFLRVVKEKDPDVLITYNGDNFDFAYLKKRCEKLGINFALGRDGSEPKIQRMGDRFAVEVKGRIHFDLYPVIRRTINLPTYTLEAVYEAVFGQPKEKVYAEEITTAWETGENLERVARYSMEDAKVTYELGKEFLPMEAQLSRLIGQSLWDVSRSSTGNLVEWFLLRKAYERNELAPNKPDEKELARRRQSYEGGYVKEPERGLWENIVYLDFRSLYPSIIITHNVSPDTLNREGCKEYDVAPQVGHRFCKDFPGFIPSLLGDLLEERQKIKKKMKATIDPIERKLLDYRQRAIKILANSYYGYYGYARARWYCKECAESVTAWGREYITMTIKEIEEKYGFKVIYSDTDGFFATIPGADAETVKKKAMEFLKYINAKLPGALELEYEGFYKRGFFVTKKKYAVIDEEGKITTRGLEIVRRDWSEIAKETQARVLEALLKDGDVEKAVRIVKEVTEKLSKYEVPPEKLVIHEQITRDLKDYKATGPHVAVAKRLAARGVKIRPGTVISYIVLKGSGRIGDRAIPFDEFDPTKHKYDAEYYIENQVLPAVERILRAFGYRKEDLRYQKTRQVGLSAWLKPKGT

SEQ ID NO: 2812 - protein, 774 aa, synthetic construct
MILDTDMITEDGKPVLRIFKKENGEFKIEYDRTFEWYFYALLKDDSAIEEVKKITAERHGTVVTVKRVEKVQKKFLGRPVEVWKLYFTHPQDQPAIADKIREHPAVIDIYEYDIPFAKRYLIDKGLVPMEGDEELKMLAFDIETLYHEGEEFAEGPILMISYADEEGARVITWKNVDLPYVDVVSTEREMIKRFLRVVKEKDPDVLITYNGDNFDFAYLKKRCEKLGINFALGRDGSEPKIQRMGDRFAVEVKGRIHFDLYPVIRRTINLPTYTLEAVYEAVFGQPKEKVYAEEITTAWETGENLERVARYSMEDAKVTYELGKEFLPMEAQLSRLIGQSLWDVSRSSTGNLVEWFLLRKAYERNELAPNKPDEKELARRRQSYEGGYVKEPERGLWENIVYLDFRSLYPSIIITHNVSPDTLNREGCKEYDVAPQVGHRFCKDFPGFIPSLLGDLLEERQKIKKKMKATIDPIERKLLDYRQRAIKILANSYYGYYGYARARWYCKECAESVTAWGREYITMTIKEIEEKYGFKVIYSDTDGFFATIPGADAETVKKKAMEFLKYINAKLPGALELEYEGFYKRGFFVTKKKYAVIDEEGKITTRGLEIVRRDWSEIAKETQARVLEALLKDGDVEKAVRIVKEVTEKLSKYEVPPEKLVIHEQITRDLKDYKATGPHVAVAKRLAARGVKIRPGTVISYIVLKGSGRIGDRAIPFDEFDPTKHKYDAEYYIENQVLPAVERILRAFGYRKEDLRYQKTRQVGLSAWLKPKGT

SEQ ID NO: 2813 - protein, 774 aa, synthetic construct
MILDTDMITEDGKPVLRIFKKENGEFKIEYDRTFEWYFYALLKDDSAIEEVKKITAERHGTVVTVKRVEKVQKKFLGRPVEVWKLYFTHPQDRPAIADKIREHPAVIDIYEYDIPFAKRYLIDKGLVPMEGDEELKMLAFDIETLYHEGEEFAEGPILMISYADEEGARVITWKNVDLPYVDVVSTEREMIKRFLRVVKEKDPDVLITYNGDNFDFAYLKKRCEKLGINFALGRDGSEPKIQRMGDRFAVEVKGRIHFDLYPVIRRTINLPTYTLEAVYEAVFGQPKEKVYAEEITTAWETGENLERVARYSMEDAKVTYELGKEFLPMEAQLSRLIGQSLWDVSRSSTGNLVEWFLLRKAYERNELAPNKPDEKELARRRQSYEGGYVKEPERGLWENIVYLDFRSLYPSIIITHNVSPDTLNREGCKEYDVAPQVGHRFCKDFPGFIPSLLGDLLEERQKIKKKMKATIDPIERKLLDYRQRAIKILANSYYGYYGYARARWYCKECAESVTAWGREYITMTIKEIEEKYGFKVIYSDTDGFFATIPGADAETVKKKAMEFLKYINAKLPGALELEYEGFYKRGFFVTKKKYAVIDEEGKITTRGLEIVRRDWSEIAKETQARVLEALLKDGDVEKAVRIVKEVTEKLSKYEVPPEKLVIHEQITRDLKDYKATGPHVAVAKRLAARGVKIRPGTVISYIVLKGSGRIGDRAIPFDEFDPTKHKYDAEYYIENQVLPAVERILRAFGYRKEDLRYQKTRQVGLSAWLKPKGT

SEQ ID NO: 2814 - protein, 774 aa, synthetic construct
MILDTDMITEDGKPVLRIFKKENGEFKIEYDRTFEPYFYALLKDDSAIEEVKKITAERHGTVVTVKRVEKVQKKFLGRPVEVWKLYFTHFQDVPAIRDKIREHPAVIDIYEYDIPFAKRYLIDKGLVPMEGDEELKMLAFDIETLYHEGEEFAEGPILMISYADEEGARVITWKNVDLPYVDVVSTEREMIKRFLRVVKEKDPDVLITYNGDNFDFAYLKKRCEKLGINFALGRDGSEPKIQRMGDRFAVEVKGRIHFDLYPVIRRTINLPTYTLEAVYEAVFGQPKEKVYAEEITTAWETGENLERVARYSMEDAKVTYELGKEFLPMEAQLSRLIGQSLWDVSRSSTGNLVEWFLLRKAYERNELAPNKPDEKELARRRQSYEGGYVKEPERGLWENIVYLDFRSLYPSIIITHNVSPDTLNREGCKEYDVAPQVGHRFCKDFPGFIPSLLGDLLEERQKIKKKMKATIDPIERKLLDYRQRAIKILANSYYGYYGYARARWYCKECAESVTAWGREYITMTIKEIEEKYGFKVIYSDTDGFFATIPGADAETVKKKAMEFLKYINAKLPGALELEYEGFYKRGFFVTKKKYAVIDEEGKITTRGLEIVRRDWSEIAKETQARVLEALLKDGDVEKAVRIVKEVTEKLSKYEVPPEKLVIHEQITRDLKDYKATGPHVAVAKRLAARGVKIRPGTVISYIVLKGSGRIGDRAIPFDEFDPTKHKYDAEYYIENQVLPAVERILRAFGYRKEDLRYQKTRQVGLSAWLKPKGT

SEQ ID NO: 2815 - protein, 774 aa, synthetic construct
MILDTDMITEDGKPVLRIFKKENGEFKIEYDRTFEPYFYALLKDDSAIEEVKKITAERHGTVVTVKRVEKVQKKFLGRPVEVWKLYFTHFQDVPAIADKIREHPAVIDIYEYDIPFAKRYLIDKGLVPMEGDEELKMLAFDIETLYHEGEEFAEGPILMISYADEEGARVITWKNVDLPYVDVVSTEREMIKRFLRVVKEKDPDVLITYNGDNFDFAYLKKRCEKLGINFALGRDGSEPKIQRMGDRFAVEVKGRIHFDLYPVIRRTINLPTYTLEAVYEAVFGQPKEKVYAEEITTAWETGENLERVARYSMEDAKVTYELGKEFLPMEAQLSRLIGQSLWDVSRSSTGNLVEWFLLRKAYERNELAPNKPDEKELARRRQSYEGGYVKEPERGLWENIVYLDFRSLYPSIIITHNVSPDTLNREGCKEYDVAPQVGHRFCKDFPGFIPSLLGDLLEERQKIKKKMKATIDPIERKLLDYRQRAIKILANSYYGYYGYARARWYCKECAESVTAWGREYITMTIKEIEEKYGFKVIYSDTDGFFATIPGADAETVKKKAMEFLKYINAKLPGALELEYEGFYKRGFFVTKKKYAVIDEEGKITTRGLEIVRRDWSEIAKETQARVLEALLKDGDVEKAVRIVKEVTEKLSKYEVPPEKLVIHEQITRDLKDYKATGPHVAVAKRLAARGVKIRPGTVISYIVLKGSGRIGDRAIPFDEFDPTKHKYDAEYYIENQVLPAVERILRAFGYRKEDLRYQKTRQVGLSAWLKPKGT

SEQ ID NO: 2816 - protein, 774 aa, synthetic construct
MILDTDMITEDGKPVLRIFKKENGEFKIEYDRTFEPYFYALLKDDSAIEEVKKITAERHGTVVTVKRVEKVQKKFLGRPVEVWKLYFTHFQDVPAIFDKIREHPAVIDIYEYDIPFAKRYLIDKGLVPMEGDEELKMLAFDIETLYHEGEEFAEGPILMISYADEEGARVITWKNVDLPYVDVVSTEREMIKRFLRVVKEKDPDVLITYNGDNFDFAYLKKRCEKLGINFALGRDGSEPKIQRMGDRFAVEVKGRIHFDLYPVIRRTINLPTYTLEAVYEAVFGQPKEKVYAEEITTAWETGENLERVARYSMEDAKVTYELGKEFLPMEAQLSRLIGQSLWDVSRSSTGNLVEWFLLRKAYERNELAPNKPDEKELARRRQSYEGGYVKEPERGLWENIVYLDFRSLYPSIIITHNVSPDTLNREGCKEYDVAPQVGHRFCKDFPGFIPSLLGDLLEERQKIKKKMKATIDPIERKLLDYRQRAIKILANSYYGYYGYARARWYCKECAESVTAWGREYITMTIKEIEEKYGFKVIYSDTDGFFATIPGADAETVKKKAMEFLKYINAKLPGALELEYEGFYKRGFFVTKKKYAVIDEEGKITTRGLEIVRRDWSEIAKETQARVLEALLKDGDVEKAVRIVKEVTEKLSKYEVPPEKLVIHEQITRDLKDYKATGPHVAVAKRLAARGVKIRPGTVISYIVLKGSGRIGDRAIPFDEFDPTKHKYDAEYYIENQVLPAVERILRAFGYRKEDLRYQKTRQVGLSAWLKPKGT

SEQ ID NO: 2817 - protein, 774 aa, synthetic construct
MILDTDMITEDGKPVLRIFKKENGEFKIEYDRTFEPYFYALLKDDSAIEEVKKITAERHGTVVTVKRVEKVQKKFLGRPVEVWKLYFTHFQDVPAIHDKIREHPAVIDIYEYDIPFAKRYLIDKGLVPMEGDEELKMLAFDIETLYHEGEEFAEGPILMISYADEEGARVITWKNVDLPYVDVVSTEREMIKRFLRVVKEKDPDVLITYNGDNFDFAYLKKRCEKLGINFALGRDGSEPKIQRMGDRFAVEVKGRIHFDLYPVIRRTINLPTYTLEAVYEAVFGQPKEKVYAEEITTAWETGENLERVARYSMEDAKVTYELGKEFLPMEAQLSRLIGQSLWDVSRSSTGNLVEWFLLRKAYERNELAPNKPDEKELARRRQSYEGGYVKEPERGLWENIVYLDFRSLYPSIIITHNVSPDTLNREGCKEYDVAPQVGHRFCKDFPGFIPSLLGDLLEERQKIKKKMKATIDPIERKLLDYRQRAIKILANSYYGYYGYARARWYCKECAESVTAWGREYITMTIKEIEEKYGFKVIYSDTDGFFATIPGADAETVKKKAMEFLKYINAKLPGALELEYEGFYKRGFFVTKKKYAVIDEEGKITTRGLEIVRRDWSEIAKETQARVLEALLKDGDVEKAVRIVKEVTEKLSKYEVPPEKLVIHEQITRDLKDYKATGPHVAVAKRLAARGVKIRPGTVISYIVLKGSGRIGDRAIPFDEFDPTKHKYDAEYYIENQVLPAVERILRAFGYRKEDLRYQKTRQVGLSAWLKPKGT

SEQ ID NO: 2818 - protein, 774 aa, synthetic construct
MILDTDMITEDGKPVLRIFKKENGEFKIEYDRTFEPYFYALLKDDSAIEEVKKITAERHGTVVTVKRVEKVQKKFLGRPVEVWKLYFTHFQDVPAIRDKIREHPAVIDIYEYDIPFAKQYLIDKGLVPMEGDEELKMLAFDIETLYHEGEEFAEGPILMISYADEEGARVITWKNVDLPYVDVVSTEREMIKRFLRVVKEKDPDVLITYNGDNFDFAYLKKRCEKLGINFALGRDGSEPKIQRMGDRFAVEVKGRIHFDLYPVIRRTINLPTYTLEAVYEAVFGQPKEKVYAEEITTAWETGENLERVARYSMEDAKVTYELGKEFLPMEAQLSRLIGQSLWDVSRSSTGNLVEWFLLRKAYERNELAPNKPDEKELARRRQSYEGGYVKEPERGLWENIVYLDFRSLYPSIIITHNVSPDTLNREGCKEYDVAPQVGHRFCKDFPGFIPSLLGDLLEERQKIKKKMKATIDPIERKLLDYRQRAIKILANSYYGYYGYARARWYCKECAESVTAWGREYITMTIKEIEEKYGFKVIYSDTDGFFATIPGADAETVKKKAMEFLKYINAKLPGALELEYEGFYKRGFFVTKKKYAVIDEEGKITTRGLEIVRRDWSEIAKETQARVLEALLKDGDVEKAVRIVKEVTEKLSKYEVPPEKLVIHEQITRDLKDYKATGPHVAVAKRLAARGVKIRPGTVISYIVLKGSGRIGDRAIPFDEFDPTKHKYDAEYYIENQVLPAVERILRAFGYRKEDLRYQKTRQVGLSAWLKPKGT

SEQ ID NO: 2819 - protein, 774 aa, synthetic construct
MILDTDMITEDGKPVLRIFKKENGEFKIEYDRTFEPYFYALLKDDSAIEEVKKITAERHGTVVTVKRVEKVQKKFLGRPVEVWKLYFTHFQDIPAIRDKIREHPAVIDIYEYDIPFAKRYLIDKGLVPMEGDEELKMLAFDIETLYHEGEEFAEGPILMISYADEEGARVITWKNVDLPYVDVVSTEREMIKRFLRVVKEKDPDVLITYNGDNFDFAYLKKRCEKLGINFALGRDGSEPKIQRMGDRFAVEVKGRIHFDLYPVIRRTINLPTYTLEAVYEAVFGQPKEKVYAEEITTAWETGENLERVARYSMEDAKVTYELGKEFLPMEAQLSRLIGQSLWDVSRSSTGNLVEWFLLRKAYERNELAPNKPDEKELARRRQSYEGGYVKEPERGLWENIVYLDFRSLYPSIIITHNVSPDTLNREGCKEYDVAPQVGHRFCKDFPGFIPSLLGDLLEERQKIKKKMKATIDPIERKLLDYRQRAIKILANSYYGYYGYARARWYCKECAESVTAWGREYITMTIKEIEEKYGFKVIYSDTDGFFATIPGADAETVKKKAMEFLKYINAKLPGALELEYEGFYKRGFFVTKKKYAVIDEEGKITTRGLEIVRRDWSEIAKETQARVLEALLKDGDVEKAVRIVKEVTEKLSKYEVPPEKLVIHEQITRDLKDYKATGPHVAVAKRLAARGVKIRPGTVISYIVLKGSGRIGDRAIPFDEFDPTKHKYDAEYYIENQVLPAVERILRAFGYRKEDLRYQKTRQVGLSAWLKPKGT

SEQ ID NO: 2820 - protein, 774 aa, synthetic construct
MILDTDMITEDGKPVLRIFKKENGEFKIEYDRTFEPYFYALLKDDSAIEEVKKITAERHGTVVTVKRVEKVQKKFLGRPVEVWKLYFTHFQDIPAIADKIREHPAVIDIYEYDIPFAKRYLIDKGLVPMEGDEELKMLAFDIETLYHEGEEFAEGPILMISYADEEGARVITWKNVDLPYVDVVSTEREMIKRFLRVVKEKDPDVLITYNGDNFDFAYLKKRCEKLGINFALGRDGSEPKIQRMGDRFAVEVKGRIHFDLYPVIRRTINLPTYTLEAVYEAVFGQPKEKVYAEEITTAWETGENLERVARYSMEDAKVTYELGKEFLPMEAQLSRLIGQSLWDVSRSSTGNLVEWFLLRKAYERNELAPNKPDEKELARRRQSYEGGYVKEPERGLWENIVYLDFRSLYPSIIITHNVSPDTLNREGCKEYDVAPQVGHRFCKDFPGFIPSLLGDLLEERQKIKKKMKATIDPIERKLLDYRQRAIKILANSYYGYYGYARARWYCKECAESVTAWGREYITMTIKEIEEKYGFKVIYSDTDGFFATIPGADAETVKKKAMEFLKYINAKLPGALELEYEGFYKRGFFVTKKKYAVIDEEGKITTRGLEIVRRDWSEIAKETQARVLEALLKDGDVEKAVRIVKEVTEKLSKYEVPPEKLVIHEQITRDLKDYKATGPHVAVAKRLAARGVKIRPGTVISYIVLKGSGRIGDRAIPFDEFDPTKHKYDAEYYIENQVLPAVERILRAFGYRKEDLRYQKTRQVGLSAWLKPKGT

SEQ ID NO: 2821 - protein, 774 aa, synthetic construct
MILDTDMITEDGKPVLRIFKKENGEFKIEYDRTFEPYFYALLKDDSAIEEVKKITAERHGTVVTVKRVEKVQKKFLGRPVEVWKLYFTHFQDIPAIFDKIREHPAVIDIYEYDIPFAKRYLIDKGLVPMEGDEELKMLAFDIETLYHEGEEFAEGPILMISYADEEGARVITWKNVDLPYVDVVSTEREMIKRFLRVVKEKDPDVLITYNGDNFDFAYLKKRCEKLGINFALGRDGSEPKIQRMGDRFAVEVKGRIHFDLYPVIRRTINLPTYTLEAVYEAVFGQPKEKVYAEEITTAWETGENLERVARYSMEDAKVTYELGKEFLPMEAQLSRLIGQSLWDVSRSSTGNLVEWFLLRKAYERNELAPNKPDEKELARRRQSYEGGYVKEPERGLWENIVYLDFRSLYPSIIITHNVSPDTLNREGCKEYDVAPQVGHRFCKDFPGFIPSLLGDLLEERQKIKKKMKATIDPIERKLLDYRQRAIKILANSYYGYYGYARARWYCKECAESVTAWGREYITMTIKEIEEKYGFKVIYSDTDGFFATIPGADAETVKKKAMEFLKYINAKLPGALELEYEGFYKRGFFVTKKKYAVIDEEGKITTRGLEIVRRDWSEIAKETQARVLEALLKDGDVEKAVRIVKEVTEKLSKYEVPPEKLVIHEQITRDLKDYKATGPHVAVAKRLAARGVKIRPGTVISYIVLKGSGRIGDRAIPFDEFDPTKHKYDAEYYIENQVLPAVERILRAFGYRKEDLRYQKTRQVGLSAWLKPKGT

SEQ ID NO: 2822 - protein, 774 aa, synthetic construct
MILDTDMITEDGKPVLRIFKKENGEFKIEYDRTFEPYFYALLKDDSAIEEVKKITAERHGTVVTVKRVEKVQKKFLGRPVEVWKLYFTHFQDIPAIHDKIREHPAVIDIYEYDIPFAKRYLIDKGLVPMEGDEELKMLAFDIETLYHEGEEFAEGPILMISYADEEGARVITWKNVDLPYVDVVSTEREMIKRFLRVVKEKDPDVLITYNGDNFDFAYLKKRCEKLGINFALGRDGSEPKIQRMGDRFAVEVKGRIHFDLYPVIRRTINLPTYTLEAVYEAVFGQPKEKVYAEEITTAWETGENLERVARYSMEDAKVTYELGKEFLPMEAQLSRLIGQSLWDVSRSSTGNLVEWFLLRKAYERNELAPNKPDEKELARRRQSYEGGYVKEPERGLWENIVYLDFRSLYPSIIITHNVSPDTLNREGCKEYDVAPQVGHRFCKDFPGFIPSLLGDLLEERQKIKKKMKATIDPIERKLLDYRQRAIKILANSYYGYYGYARARWYCKECAESVTAWGREYITMTIKEIEEKYGFKVIYSDTDGFFATIPGADAETVKKKAMEFLKYINAKLPGALELEYEGFYKRGFFVTKKKYAVIDEEGKITTRGLEIVRRDWSEIAKETQARVLEALLKDGDVEKAVRIVKEVTEKLSKYEVPPEKLVIHEQITRDLKDYKATGPHVAVAKRLAARGVKIRPGTVISYIVLKGSGRIGDRAIPFDEFDPTKHKYDAEYYIENQVLPAVERILRAFGYRKEDLRYQKTRQVGLSAWLKPKGT

SEQ ID NO: 2823 - protein, 774 aa, synthetic construct
MILDTDMITEDGKPVLRIFKKENGEFKIEYDRTFEPYFYALLKDDSAIEEVKKITAERHGTVVTVKRVEKVQKKFLGRPVEVWKLYFTHFQDKPAIRDKIREHPAVIDIYEYDIPFAKQYLIDKGLVPMEGDEELKMLAFDIETLYHEGEEFAEGPILMISYADEEGARVITWKNVDLPYVDVVSTEREMIKRFLRVVKEKDPDVLITYNGDNFDFAYLKKRCEKLGINFALGRDGSEPKIQRMGDRFAVEVKGRIHFDLYPVIRRTINLPTYTLEAVYEAVFGQPKEKVYAEEITTAWETGENLERVARYSMEDAKVTYELGKEFLPMEAQLSRLIGQSLWDVSRSSTGNLVEWFLLRKAYERNELAPNKPDEKELARRRQSYEGGYVKEPERGLWENIVYLDFRSLYPSIIITHNVSPDTLNREGCKEYDVAPQVGHRFCKDFPGFIPSLLGDLLEERQKIKKKMKATIDPIERKLLDYRQRAIKILANSYYGYYGYARARWYCKECAESVTAWGREYITMTIKEIEEKYGFKVIYSDTDGFFATIPGADAETVKKKAMEFLKYINAKLPGALELEYEGFYKRGFFVTKKKYAVIDEEGKITTRGLEIVRRDWSEIAKETQARVLEALLKDGDVEKAVRIVKEVTEKLSKYEVPPEKLVIHEQITRDLKDYKATGPHVAVAKRLAARGVKIRPGTVISYIVLKGSGRIGDRAIPFDEFDPTKHKYDAEYYIENQVLPAVERILRAFGYRKEDLRYQKTRQVGLSAWLKPKGT

SEQ ID NO: 2824 - protein, 774 aa, synthetic construct
MILDTDMITEDGKPVLRIFKKENGEFKIEYDRTFEPYFYALLKDDSAIEEVKKITAERHGTVVTVKRVEKVQKKFLGRPVEVWKLYFTHFQDQPAIRDKIREHPAVIDIYEYDIPFAKRYLIDKGLVPMEGDEELKMLAFDIETLYHEGEEFAEGPILMISYADEEGARVITWKNVDLPYVDVVSTEREMIKRFLRVVKEKDPDVLITYNGDNFDFAYLKKRCEKLGINFALGRDGSEPKIQRMGDRFAVEVKGRIHFDLYPVIRRTINLPTYTLEAVYEAVFGQPKEKVYAEEITTAWETGENLERVARYSMEDAKVTYELGKEFLPMEAQLSRLIGQSLWDVSRSSTGNLVEWFLLRKAYERNELAPNKPDEKELARRRQSYEGGYVKEPERGLWENIVYLDFRSLYPSIIITHNVSPDTLNREGCKEYDVAPQVGHRFCKDFPGFIPSLLGDLLEERQKIKKKMKATIDPIERKLLDYRQRAIKILANSYYGYYGYARARWYCKECAESVTAWGREYITMTIKEIEEKYGFKVIYSDTDGFFATIPGADAETVKKKAMEFLKYINAKLPGALELEYEGFYKRGFFVTKKKYAVIDEEGKITTRGLEIVRRDWSEIAKETQARVLEALLKDGDVEKAVRIVKEVTEKLSKYEVPPEKLVIHEQITRDLKDYKATGPHVAVAKRLAARGVKIRPGTVISYIVLKGSGRIGDRAIPFDEFDPTKHKYDAEYYIENQVLPAVERILRAFGYRKEDLRYQKTRQVGLSAWLKPKGT

SEQ ID NO: 2825 - protein, 774 aa, synthetic construct
MILDTDMITEDGKPVLRIFKKENGEFKIEYDRTFEPYFYALLKDDSAIEEVKKITAERHGTVVTVKRVEKVQKKFLGRPVEVWKLYFTHFQDQPAIADKIREHPAVIDIYEYDIPFAKRYLIDKGLVPMEGDEELKMLAFDIETLYHEGEEFAEGPILMISYADEEGARVITWKNVDLPYVDVVSTEREMIKRFLRVVKEKDPDVLITYNGDNFDFAYLKKRCEKLGINFALGRDGSEPKIQRMGDRFAVEVKGRIHFDLYPVIRRTINLPTYTLEAVYEAVFGQPKEKVYAEEITTAWETGENLERVARYSMEDAKVTYELGKEFLPMEAQLSRLIGQSLWDVSRSSTGNLVEWFLLRKAYERNELAPNKPDEKELARRRQSYEGGYVKEPERGLWENIVYLDFRSLYPSIIITHNVSPDTLNREGCKEYDVAPQVGHRFCKDFPGFIPSLLGDLLEERQKIKKKMKATIDPIERKLLDYRQRAIKILANSYYGYYGYARARWYCKECAESVTAWGREYITMTIKEIEEKYGFKVIYSDTDGFFATIPGADAETVKKKAMEFLKYINAKLPGALELEYEGFYKRGFFVTKKKYAVIDEEGKITTRGLEIVRRDWSEIAKETQARVLEALLKDGDVEKAVRIVKEVTEKLSKYEVPPEKLVIHEQITRDLKDYKATGPHVAVAKRLAARGVKIRPGTVISYIVLKGSGRIGDRAIPFDEFDPTKHKYDAEYYIENQVLPAVERILRAFGYRKEDLRYQKTRQVGLSAWLKPKGT

SEQ ID NO: 2826 - protein, 774 aa, synthetic construct
MILDTDMITEDGKPVLRIFKKENGEFKIEYDRTFEPYFYALLKDDSAIEEVKKITAERHGTVVTVKRVEKVQKKFLGRPVEVWKLYFTHFQDRPAIWDKIREHPAVIDIYEYDIPFAKRYLIDKGLVPMEGDEELKMLAFDIETLYHEGEEFAEGPILMISYADEEGARVITWKNVDLPYVDVVSTEREMIKRFLRVVKEKDPDVLITYNGDNFDFAYLKKRCEKLGINFALGRDGSEPKIQRMGDRFAVEVKGRIHFDLYPVIRRTINLPTYTLEAVYEAVFGQPKEKVYAEEITTAWETGENLERVARYSMEDAKVTYELGKEFLPMEAQLSRLIGQSLWDVSRSSTGNLVEWFLLRKAYERNELAPNKPDEKELARRRQSYEGGYVKEPERGLWENIVYLDFRSLYPSIIITHNVSPDTLNREGCKEYDVAPQVGHRFCKDFPGFIPSLLGDLLEERQKIKKKMKATIDPIERKLLDYRQRAIKILANSYYGYYGYARARWYCKECAESVTAWGREYITMTIKEIEEKYGFKVIYSDTDGFFATIPGADAETVKKKAMEFLKYINAKLPGALELEYEGFYKRGFFVTKKKYAVIDEEGKITTRGLEIVRRDWSEIAKETQARVLEALLKDGDVEKAVRIVKEVTEKLSKYEVPPEKLVIHEQITRDLKDYKATGPHVAVAKRLAARGVKIRPGTVISYIVLKGSGRIGDRAIPFDEFDPTKHKYDAEYYIENQVLPAVERILRAFGYRKEDLRYQKTRQVGLSAWLKPKGT

SEQ ID NO: 2827 - protein, 774 aa, synthetic construct
MILDTDMITEDGKPVLRIFKKENGEFKIEYDRTFEPYFYALLKDDSAIEEVKKITAERHGTVVTVKRVEKVQKKFLGRPVEVWKLYFTHIQDVPAIRDKIREHPAVIDIYEYDIPFAKRYLIDKGLVPMEGDEELKMLAFDIETLYHEGEEFAEGPILMISYADEEGARVITWKNVDLPYVDVVSTEREMIKRFLRVVKEKDPDVLITYNGDNFDFAYLKKRCEKLGINFALGRDGSEPKIQRMGDRFAVEVKGRIHFDLYPVIRRTINLPTYTLEAVYEAVFGQPKEKVYAEEITTAWETGENLERVARYSMEDAKVTYELGKEFLPMEAQLSRLIGQSLWDVSRSSTGNLVEWFLLRKAYERNELAPNKPDEKELARRRQSYEGGYVKEPERGLWENIVYLDFRSLYPSIIITHNVSPDTLNREGCKEYDVAPQVGHRFCKDFPGFIPSLLGDLLEERQKIKKKMKATIDPIERKLLDYRQRAIKILANSYYGYYGYARARWYCKECAESVTAWGREYITMTIKEIEEKYGFKVIYSDTDGFFATIPGADAETVKKKAMEFLKYINAKLPGALELEYEGFYKRGFFVTKKKYAVIDEEGKITTRGLEIVRRDWSEIAKETQARVLEALLKDGDVEKAVRIVKEVTEKLSKYEVPPEKLVIHEQITRDLKDYKATGPHVAVAKRLAARGVKIRPGTVISYIVLKGSGRIGDRAIPFDEFDPTKHKYDAEYYIENQVLPAVERILRAFGYRKEDLRYQKTRQVGLSAWLKPKGT

SEQ ID NO: 2828 - protein, 774 aa, synthetic construct
MILDTDMITEDGKPVLRIFKKENGEFKIEYDRTFEPYFYALLKDDSAIEEVKKITAERHGTVVTVKRVEKVQKKFLGRPVEVWKLYFTHIQDVPAIFDKIREHPAVIDIYEYDIPFAKRYLIDKGLVPMEGDEELKMLAFDIETLYHEGEEFAEGPILMISYADEEGARVITWKNVDLPYVDVVSTEREMIKRFLRVVKEKDPDVLITYNGDNFDFAYLKKRCEKLGINFALGRDGSEPKIQRMGDRFAVEVKGRIHFDLYPVIRRTINLPTYTLEAVYEAVFGQPKEKVYAEEITTAWETGENLERVARYSMEDAKVTYELGKEFLPMEAQLSRLIGQSLWDVSRSSTGNLVEWFLLRKAYERNELAPNKPDEKELARRRQSYEGGYVKEPERGLWENIVYLDFRSLYPSIIITHNVSPDTLNREGCKEYDVAPQVGHRFCKDFPGFIPSLLGDLLEERQKIKKKMKATIDPIERKLLDYRQRAIKILANSYYGYYGYARARWYCKECAESVTAWGREYITMTIKEIEEKYGFKVIYSDTDGFFATIPGADAETVKKKAMEFLKYINAKLPGALELEYEGFYKRGFFVTKKKYAVIDEEGKITTRGLEIVRRDWSEIAKETQARVLEALLKDGDVEKAVRIVKEVTEKLSKYEVPPEKLVIHEQITRDLKDYKATGPHVAVAKRLAARGVKIRPGTVISYIVLKGSGRIGDRAIPFDEFDPTKHKYDAEYYIENQVLPAVERILRAFGYRKEDLRYQKTRQVGLSAWLKPKGT

SEQ ID NO: 2829 - protein, 774 aa, synthetic construct
MILDTDMITEDGKPVLRIFKKENGEFKIEYDRTFEPYFYALLKDDSAIEEVKKITAERHGTVVTVKRVEKVQKKFLGRPVEVWKLYFTHIQDIPAIRDKIREHPAVIDIYEYDIPFAKRYLIDKGLVPMEGDEELKMLAFDIETLYHEGEEFAEGPILMISYADEEGARVITWKNVDLPYVDVVSTEREMIKRFLRVVKEKDPDVLITYNGDNFDFAYLKKRCEKLGINFALGRDGSEPKIQRMGDRFAVEVKGRIHFDLYPVIRRTINLPTYTLEAVYEAVFGQPKEKVYAEEITTAWETGENLERVARYSMEDAKVTYELGKEFLPMEAQLSRLIGQSLWDVSRSSTGNLVEWFLLRKAYERNELAPNKPDEKELARRRQSYEGGYVKEPERGLWENIVYLDFRSLYPSIIITHNVSPDTLNREGCKEYDVAPQVGHRFCKDFPGFIPSLLGDLLEERQKIKKKMKATIDPIERKLLDYRQRAIKILANSYYGYYGYARARWYCKECAESVTAWGREYITMTIKEIEEKYGFKVIYSDTDGFFATIPGADAETVKKKAMEFLKYINAKLPGALELEYEGFYKRGFFVTKKKYAVIDEEGKITTRGLEIVRRDWSEIAKETQARVLEALLKDGDVEKAVRIVKEVTEKLSKYEVPPEKLVIHEQITRDLKDYKATGPHVAVAKRLAARGVKIRPGTVISYIVLKGSGRIGDRAIPFDEFDPTKHKYDAEYYIENQVLPAVERILRAFGYRKEDLRYQKTRQVGLSAWLKPKGT

SEQ ID NO: 2830 - protein, 774 aa, synthetic construct
MILDTDMITEDGKPVLRIFKKENGEFKIEYDRTFEPYFYALLKDDSAIEEVKKITAERHGTVVTVKRVEKVQKKFLGRPVEVWKLYFTHIQDIPAIADKIREHPAVIDIYEYDIPFAKRYLIDKGLVPMEGDEELKMLAFDIETLYHEGEEFAEGPILMISYADEEGARVITWKNVDLPYVDVVSTEREMIKRFLRVVKEKDPDVLITYNGDNFDFAYLKKRCEKLGINFALGRDGSEPKIQRMGDRFAVEVKGRIHFDLYPVIRRTINLPTYTLEAVYEAVFGQPKEKVYAEEITTAWETGENLERVARYSMEDAKVTYELGKEFLPMEAQLSRLIGQSLWDVSRSSTGNLVEWFLLRKAYERNELAPNKPDEKELARRRQSYEGGYVKEPERGLWENIVYLDFRSLYPSIIITHNVSPDTLNREGCKEYDVAPQVGHRFCKDFPGFIPSLLGDLLEERQKIKKKMKATIDPIERKLLDYRQRAIKILANSYYGYYGYARARWYCKECAESVTAWGREYITMTIKEIEEKYGFKVIYSDTDGFFATIPGADAETVKKKAMEFLKYINAKLPGALELEYEGFYKRGFFVTKKKYAVIDEEGKITTRGLEIVRRDWSEIAKETQARVLEALLKDGDVEKAVRIVKEVTEKLSKYEVPPEKLVIHEQITRDLKDYKATGPHVAVAKRLAARGVKIRPGTVISYIVLKGSGRIGDRAIPFDEFDPTKHKYDAEYYIENQVLPAVERILRAFGYRKEDLRYQKTRQVGLSAWLKPKGT

SEQ ID NO: 2831 - protein, 774 aa, synthetic construct
MILDTDMITEDGKPVLRIFKKENGEFKIEYDRTFEPYFYALLKDDSAIEEVKKITAERHGTVVTVKRVEKVQKKFLGRPVEVWKLYFTHIQDIPAIHDKIREHPAVIDIYEYDIPFAKRYLIDKGLVPMEGDEELKMLAFDIETLYHEGEEFAEGPILMISYADEEGARVITWKNVDLPYVDVVSTEREMIKRFLRVVKEKDPDVLITYNGDNFDFAYLKKRCEKLGINFALGRDGSEPKIQRMGDRFAVEVKGRIHFDLYPVIRRTINLPTYTLEAVYEAVFGQPKEKVYAEEITTAWETGENLERVARYSMEDAKVTYELGKEFLPMEAQLSRLIGQSLWDVSRSSTGNLVEWFLLRKAYERNELAPNKPDEKELARRRQSYEGGYVKEPERGLWENIVYLDFRSLYPSIIITHNVSPDTLNREGCKEYDVAPQVGHRFCKDFPGFIPSLLGDLLEERQKIKKKMKATIDPIERKLLDYRQRAIKILANSYYGYYGYARARWYCKECAESVTAWGREYITMTIKEIEEKYGFKVIYSDTDGFFATIPGADAETVKKKAMEFLKYINAKLPGALELEYEGFYKRGFFVTKKKYAVIDEEGKITTRGLEIVRRDWSEIAKETQARVLEALLKDGDVEKAVRIVKEVTEKLSKYEVPPEKLVIHEQITRDLKDYKATGPHVAVAKRLAARGVKIRPGTVISYIVLKGSGRIGDRAIPFDEFDPTKHKYDAEYYIENQVLPAVERILRAFGYRKEDLRYQKTRQVGLSAWLKPKGT

SEQ ID NO: 2832 - protein, 774 aa, synthetic construct
MILDTDMITEDGKPVLRIFKKENGEFKIEYDRTFEPYFYALLKDDSAIEEVKKITAERHGTVVTVKRVEKVQKKFLGRPVEVWKLYFTHIQDQPAIRDKIREHPAVIDIYEYDIPFAKRYLIDKGLVPMEGDEELKMLAFDIETLYHEGEEFAEGPILMISYADEEGARVITWKNVDLPYVDVVSTEREMIKRFLRVVKEKDPDVLITYNGDNFDFAYLKKRCEKLGINFALGRDGSEPKIQRMGDRFAVEVKGRIHFDLYPVIRRTINLPTYTLEAVYEAVFGQPKEKVYAEEITTAWETGENLERVARYSMEDAKVTYELGKEFLPMEAQLSRLIGQSLWDVSRSSTGNLVEWFLLRKAYERNELAPNKPDEKELARRRQSYEGGYVKEPERGLWENIVYLDFRSLYPSIIITHNVSPDTLNREGCKEYDVAPQVGHRFCKDFPGFIPSLLGDLLEERQKIKKKMKATIDPIERKLLDYRQRAIKILANSYYGYYGYARARWYCKECAESVTAWGREYITMTIKEIEEKYGFKVIYSDTDGFFATIPGADAETVKKKAMEFLKYINAKLPGALELEYEGFYKRGFFVTKKKYAVIDEEGKITTRGLEIVRRDWSEIAKETQARVLEALLKDGDVEKAVRIVKEVTEKLSKYEVPPEKLVIHEQITRDLKDYKATGPHVAVAKRLAARGVKIRPGTVISYIVLKGSGRIGDRAIPFDEFDPTKHKYDAEYYIENQVLPAVERILRAFGYRKEDLRYQKTRQVGLSAWLKPKGT

SEQ ID NO: 2833 - protein, 774 aa, synthetic construct
MILDTDMITEDGKPVLRIFKKENGEFKIEYDRTFEPYFYALLKDDSAIEEVKKITAERHGTVVTVKRVEKVQKKFLGRPVEVWKLYFTHIQDRPAIRDKIREHPAVIDIYEYDIPFAKRYLIDKGLVPMEGDEELKMLAFDIETLYHEGEEFAEGPILMISYADEEGARVITWKNVDLPYVDVVSTEREMIKRFLRVVKEKDPDVLITYNGDNFDFAYLKKRCEKLGINFALGRDGSEPKIQRMGDRFAVEVKGRIHFDLYPVIRRTINLPTYTLEAVYEAVFGQPKEKVYAEEITTAWETGENLERVARYSMEDAKVTYELGKEFLPMEAQLSRLIGQSLWDVSRSSTGNLVEWFLLRKAYERNELAPNKPDEKELARRRQSYEGGYVKEPERGLWENIVYLDFRSLYPSIIITHNVSPDTLNREGCKEYDVAPQVGHRFCKDFPGFIPSLLGDLLEERQKIKKKMKATIDPIERKLLDYRQRAIKILANSYYGYYGYARARWYCKECAESVTAWGREYITMTIKEIEEKYGFKVIYSDTDGFFATIPGADAETVKKKAMEFLKYINAKLPGALELEYEGFYKRGFFVTKKKYAVIDEEGKITTRGLEIVRRDWSEIAKETQARVLEALLKDGDVEKAVRIVKEVTEKLSKYEVPPEKLVIHEQITRDLKDYKATGPHVAVAKRLAARGVKIRPGTVISYIVLKGSGRIGDRAIPFDEFDPTKHKYDAEYYIENQVLPAVERILRAFGYRKEDLRYQKTRQVGLSAWLKPKGT

SEQ ID NO: 2834 - protein, 774 aa, synthetic construct
MILDTDMITEDGKPVLRIFKKENGEFKIEYDRTFEPYFYALLKDDSAIEEVKKITAERHGTVVTVKRVEKVQKKFLGRPVEVWKLYFTHSQDVPAIADKIREHPAVIDIYEYDIPFAKRYLIDKGLVPMEGDEELKMLAFDIETLYHEGEEFAEGPILMISYADEEGARVITWKNVDLPYVDVVSTEREMIKRFLRVVKEKDPDVLITYNGDNFDFAYLKKRCEKLGINFALGRDGSEPKIQRMGDRFAVEVKGRIHFDLYPVIRRTINLPTYTLEAVYEAVFGQPKEKVYAEEITTAWETGENLERVARYSMEDAKVTYELGKEFLPMEAQLSRLIGQSLWDVSRSSTGNLVEWFLLRKAYERNELAPNKPDEKELARRRQSYEGGYVKEPERGLWENIVYLDFRSLYPSIIITHNVSPDTLNREGCKEYDVAPQVGHRFCKDFPGFIPSLLGDLLEERQKIKKKMKATIDPIERKLLDYRQRAIKILANSYYGYYGYARARWYCKECAESVTAWGREYITMTIKEIEEKYGFKVIYSDTDGFFATIPGADAETVKKKAMEFLKYINAKLPGALELEYEGFYKRGFFVTKKKYAVIDEEGKITTRGLEIVRRDWSEIAKETQARVLEALLKDGDVEKAVRIVKEVTEKLSKYEVPPEKLVIHEQITRDLKDYKATGPHVAVAKRLAARGVKIRPGTVISYIVLKGSGRIGDRAIPFDEFDPTKHKYDAEYYIENQVLPAVERILRAFGYRKEDLRYQKTRQVGLSAWLKPKGT

SEQ ID NO: 2835 - protein, 774 aa, synthetic construct
MILDTDMITEDGKPVLRIFKKENGEFKIEYDRTFEPYFYALLKDDSAIEEVKKITAERHGTVVTVKRVEKVQKKFLGRPVEVWKLYFTHSQDIPAIRDKIREHPAVIDIYEYDIPFAKRYLIDKGLVPMEGDEELKMLAFDIETLYHEGEEFAEGPILMISYADEEGARVITWKNVDLPYVDVVSTEREMIKRFLRVVKEKDPDVLITYNGDNFDFAYLKKRCEKLGINFALGRDGSEPKIQRMGDRFAVEVKGRIHFDLYPVIRRTINLPTYTLEAVYEAVFGQPKEKVYAEEITTAWETGENLERVARYSMEDAKVTYELGKEFLPMEAQLSRLIGQSLWDVSRSSTGNLVEWFLLRKAYERNELAPNKPDEKELARRRQSYEGGYVKEPERGLWENIVYLDFRSLYPSIIITHNVSPDTLNREGCKEYDVAPQVGHRFCKDFPGFIPSLLGDLLEERQKIKKKMKATIDPIERKLLDYRQRAIKILANSYYGYYGYARARWYCKECAESVTAWGREYITMTIKEIEEKYGFKVIYSDTDGFFATIPGADAETVKKKAMEFLKYINAKLPGALELEYEGFYKRGFFVTKKKYAVIDEEGKITTRGLEIVRRDWSEIAKETQARVLEALLKDGDVEKAVRIVKEVTEKLSKYEVPPEKLVIHEQITRDLKDYKATGPHVAVAKRLAARGVKIRPGTVISYIVLKGSGRIGDRAIPFDEFDPTKHKYDAEYYIENQVLPAVERILRAFGYRKEDLRYQKTRQVGLSAWLKPKGT

SEQ ID NO: 2836 - protein, 774 aa, synthetic construct
MILDTDMITEDGKPVLRIFKKENGEFKIEYDRTFEPYFYALLKDDSAIEEVKKITAERHGTVVTVKRVEKVQKKFLGRPVEVWKLYFTHSQDIPAIADKIREHPAVIDIYEYDIPFAKRYLIDKGLVPMEGDEELKMLAFDIETLYHEGEEFAEGPILMISYADEEGARVITWKNVDLPYVDVVSTEREMIKRFLRVVKEKDPDVLITYNGDNFDFAYLKKRCEKLGINFALGRDGSEPKIQRMGDRFAVEVKGRIHFDLYPVIRRTINLPTYTLEAVYEAVFGQPKEKVYAEEITTAWETGENLERVARYSMEDAKVTYELGKEFLPMEAQLSRLIGQSLWDVSRSSTGNLVEWFLLRKAYERNELAPNKPDEKELARRRQSYEGGYVKEPERGLWENIVYLDFRSLYPSIIITHNVSPDTLNREGCKEYDVAPQVGHRFCKDFPGFIPSLLGDLLEERQKIKKKMKATIDPIERKLLDYRQRAIKILANSYYGYYGYARARWYCKECAESVTAWGREYITMTIKEIEEKYGFKVIYSDTDGFFATIPGADAETVKKKAMEFLKYINAKLPGALELEYEGFYKRGFFVTKKKYAVIDEEGKITTRGLEIVRRDWSEIAKETQARVLEALLKDGDVEKAVRIVKEVTEKLSKYEVPPEKLVIHEQITRDLKDYKATGPHVAVAKRLAARGVKIRPGTVISYIVLKGSGRIGDRAIPFDEFDPTKHKYDAEYYIENQVLPAVERILRAFGYRKEDLRYQKTRQVGLSAWLKPKGT

SEQ ID NO: 2837 - protein, 774 aa, synthetic construct
MILDTDMITEDGKPVLRIFKKENGEFKIEYDRTFEPYFYALLKDDSAIEEVKKITAERHGTVVTVKRVEKVQKKFLGRPVEVWKLYFTHWQDVPAIRDKIREHPAVIDIYEYDIPFAKRYLIDKGLVPMEGDEELKMLAFDIETLYHEGEEFAEGPILMISYADEEGARVITWKNVDLPYVDVVSTEREMIKRFLRVVKEKDPDVLITYNGDNFDFAYLKKRCEKLGINFALGRDGSEPKIQRMGDRFAVEVKGRIHFDLYPVIRRTINLPTYTLEAVYEAVFGQPKEKVYAEEITTAWETGENLERVARYSMEDAKVTYELGKEFLPMEAQLSRLIGQSLWDVSRSSTGNLVEWFLLRKAYERNELAPNKPDEKELARRRQSYEGGYVKEPERGLWENIVYLDFRSLYPSIIITHNVSPDTLNREGCKEYDVAPQVGHRFCKDFPGFIPSLLGDLLEERQKIKKKMKATIDPIERKLLDYRQRAIKILANSYYGYYGYARARWYCKECAESVTAWGREYITMTIKEIEEKYGFKVIYSDTDGFFATIPGADAETVKKKAMEFLKYINAKLPGALELEYEGFYKRGFFVTKKKYAVIDEEGKITTRGLEIVRRDWSEIAKETQARVLEALLKDGDVEKAVRIVKEVTEKLSKYEVPPEKLVIHEQITRDLKDYKATGPHVAVAKRLAARGVKIRPGTVISYIVLKGSGRIGDRAIPFDEFDPTKHKYDAEYYIENQVLPAVERILRAFGYRKEDLRYQKTRQVGLSAWLKPKGT

SEQ ID NO: 2838 - protein, 774 aa, synthetic construct
MILDTDMITEDGKPVLRIFKKENGEFKIEYDRTFEPYFYALLKDDSAIEEVKKITAERHGTVVTVKRVEKVQKKFLGRPVEVWKLYFTHWQDVPAIADKIREHPAVIDIYEYDIPFAKRYLIDKGLVPMEGDEELKMLAFDIETLYHEGEEFAEGPILMISYADEEGARVITWKNVDLPYVDVVSTEREMIKRFLRVVKEKDPDVLITYNGDNFDFAYLKKRCEKLGINFALGRDGSEPKIQRMGDRFAVEVKGRIHFDLYPVIRRTINLPTYTLEAVYEAVFGQPKEKVYAEEITTAWETGENLERVARYSMEDAKVTYELGKEFLPMEAQLSRLIGQSLWDVSRSSTGNLVEWFLLRKAYERNELAPNKPDEKELARRRQSYEGGYVKEPERGLWENIVYLDFRSLYPSIIITHNVSPDTLNREGCKEYDVAPQVGHRFCKDFPGFIPSLLGDLLEERQKIKKKMKATIDPIERKLLDYRQRAIKILANSYYGYYGYARARWYCKECAESVTAWGREYITMTIKEIEEKYGFKVIYSDTDGFFATIPGADAETVKKKAMEFLKYINAKLPGALELEYEGFYKRGFFVTKKKYAVIDEEGKITTRGLEIVRRDWSEIAKETQARVLEALLKDGDVEKAVRIVKEVTEKLSKYEVPPEKLVIHEQITRDLKDYKATGPHVAVAKRLAARGVKIRPGTVISYIVLKGSGRIGDRAIPFDEFDPTKHKYDAEYYIENQVLPAVERILRAFGYRKEDLRYQKTRQVGLSAWLKPKGT

SEQ ID NO: 2839 - protein, 774 aa, synthetic construct
MILDTDMITEDGKPVLRIFKKENGEFKIEYDRTFEPYFYALLKDDSAIEEVKKITAERHGTVVTVKRVEKVQKKFLGRPVEVWKLYFTHWQDVPAIFDKIREHPAVIDIYEYDIPFAKRYLIDKGLVPMEGDEELKMLAFDIETLYHEGEEFAEGPILMISYADEEGARVITWKNVDLPYVDVVSTEREMIKRFLRVVKEKDPDVLITYNGDNFDFAYLKKRCEKLGINFALGRDGSEPKIQRMGDRFAVEVKGRIHFDLYPVIRRTINLPTYTLEAVYEAVFGQPKEKVYAEEITTAWETGENLERVARYSMEDAKVTYELGKEFLPMEAQLSRLIGQSLWDVSRSSTGNLVEWFLLRKAYERNELAPNKPDEKELARRRQSYEGGYVKEPERGLWENIVYLDFRSLYPSIIITHNVSPDTLNREGCKEYDVAPQVGHRFCKDFPGFIPSLLGDLLEERQKIKKKMKATIDPIERKLLDYRQRAIKILANSYYGYYGYARARWYCKECAESVTAWGREYITMTIKEIEEKYGFKVIYSDTDGFFATIPGADAETVKKKAMEFLKYINAKLPGALELEYEGFYKRGFFVTKKKYAVIDEEGKITTRGLEIVRRDWSEIAKETQARVLEALLKDGDVEKAVRIVKEVTEKLSKYEVPPEKLVIHEQITRDLKDYKATGPHVAVAKRLAARGVKIRPGTVISYIVLKGSGRIGDRAIPFDEFDPTKHKYDAEYYIENQVLPAVERILRAFGYRKEDLRYQKTRQVGLSAWLKPKGT

SEQ ID NO: 2840 - protein, 774 aa, synthetic construct
MILDTDMITEDGKPVLRIFKKENGEFKIEYDRTFEPYFYALLKDDSAIEEVKKITAERHGTVVTVKRVEKVQKKFLGRPVEVWKLYFTHWQDVPAIHDKIREHPAVIDIYEYDIPFAKRYLIDKGLVPMEGDEELKMLAFDIETLYHEGEEFAEGPILMISYADEEGARVITWKNVDLPYVDVVSTEREMIKRFLRVVKEKDPDVLITYNGDNFDFAYLKKRCEKLGINFALGRDGSEPKIQRMGDRFAVEVKGRIHFDLYPVIRRTINLPTYTLEAVYEAVFGQPKEKVYAEEITTAWETGENLERVARYSMEDAKVTYELGKEFLPMEAQLSRLIGQSLWDVSRSSTGNLVEWFLLRKAYERNELAPNKPDEKELARRRQSYEGGYVKEPERGLWENIVYLDFRSLYPSIIITHNVSPDTLNREGCKEYDVAPQVGHRFCKDFPGFIPSLLGDLLEERQKIKKKMKATIDPIERKLLDYRQRAIKILANSYYGYYGYARARWYCKECAESVTAWGREYITMTIKEIEEKYGFKVIYSDTDGFFATIPGADAETVKKKAMEFLKYINAKLPGALELEYEGFYKRGFFVTKKKYAVIDEEGKITTRGLEIVRRDWSEIAKETQARVLEALLKDGDVEKAVRIVKEVTEKLSKYEVPPEKLVIHEQITRDLKDYKATGPHVAVAKRLAARGVKIRPGTVISYIVLKGSGRIGDRAIPFDEFDPTKHKYDAEYYIENQVLPAVERILRAFGYRKEDLRYQKTRQVGLSAWLKPKGT

SEQ ID NO: 2841 - protein, 774 aa, synthetic construct
MILDTDMITEDGKPVLRIFKKENGEFKIEYDRTFEPYFYALLKDDSAIEEVKKITAERHGTVVTVKRVEKVQKKFLGRPVEVWKLYFTHWQDIPAIRDKIREHPAVIDIYEYDIPFAKRYLIDKGLVPMEGDEELKMLAFDIETLYHEGEEFAEGPILMISYADEEGARVITWKNVDLPYVDVVSTEREMIKRFLRVVKEKDPDVLITYNGDNFDFAYLKKRCEKLGINFALGRDGSEPKIQRMGDRFAVEVKGRIHFDLYPVIRRTINLPTYTLEAVYEAVFGQPKEKVYAEEITTAWETGENLERVARYSMEDAKVTYELGKEFLPMEAQLSRLIGQSLWDVSRSSTGNLVEWFLLRKAYERNELAPNKPDEKELARRRQSYEGGYVKEPERGLWENIVYLDFRSLYPSIIITHNVSPDTLNREGCKEYDVAPQVGHRFCKDFPGFIPSLLGDLLEERQKIKKKMKATIDPIERKLLDYRQRAIKILANSYYGYYGYARARWYCKECAESVTAWGREYITMTIKEIEEKYGFKVIYSDTDGFFATIPGADAETVKKKAMEFLKYINAKLPGALELEYEGFYKRGFFVTKKKYAVIDEEGKITTRGLEIVRRDWSEIAKETQARVLEALLKDGDVEKAVRIVKEVTEKLSKYEVPPEKLVIHEQITRDLKDYKATGPHVAVAKRLAARGVKIRPGTVISYIVLKGSGRIGDRAIPFDEFDPTKHKYDAEYYIENQVLPAVERILRAFGYRKEDLRYQKTRQVGLSAWLKPKGT

SEQ ID NO: 2842 - protein, 774 aa, synthetic construct
MILDTDMITEDGKPVLRIFKKENGEFKIEYDRTFEPYFYALLKDDSAIEEVKKITAERHGTVVTVKRVEKVQKKFLGRPVEVWKLYFTHWQDIPAIADKIREHPAVIDIYEYDIPFAKRYLIDKGLVPMEGDEELKMLAFDIETLYHEGEEFAEGPILMISYADEEGARVITWKNVDLPYVDVVSTEREMIKRFLRVVKEKDPDVLITYNGDNFDFAYLKKRCEKLGINFALGRDGSEPKIQRMGDRFAVEVKGRIHFDLYPVIRRTINLPTYTLEAVYEAVFGQPKEKVYAEEITTAWETGENLERVARYSMEDAKVTYELGKEFLPMEAQLSRLIGQSLWDVSRSSTGNLVEWFLLRKAYERNELAPNKPDEKELARRRQSYEGGYVKEPERGLWENIVYLDFRSLYPSIIITHNVSPDTLNREGCKEYDVAPQVGHRFCKDFPGFIPSLLGDLLEERQKIKKKMKATIDPIERKLLDYRQRAIKILANSYYGYYGYARARWYCKECAESVTAWGREYITMTIKEIEEKYGFKVIYSDTDGFFATIPGADAETVKKKAMEFLKYINAKLPGALELEYEGFYKRGFFVTKKKYAVIDEEGKITTRGLEIVRRDWSEIAKETQARVLEALLKDGDVEKAVRIVKEVTEKLSKYEVPPEKLVIHEQITRDLKDYKATGPHVAVAKRLAARGVKIRPGTVISYIVLKGSGRIGDRAIPFDEFDPTKHKYDAEYYIENQVLPAVERILRAFGYRKEDLRYQKTRQVGLSAWLKPKGT

SEQ ID NO: 2843 - protein, 774 aa, synthetic construct
MILDTDMITEDGKPVLRIFKKENGEFKIEYDRTFEPYFYALLKDDSAIEEVKKITAERHGTVVTVKRVEKVQKKFLGRPVEVWKLYFTHWQDIPAIFDKIREHPAVIDIYEYDIPFAKRYLIDKGLVPMEGDEELKMLAFDIETLYHEGEEFAEGPILMISYADEEGARVITWKNVDLPYVDVVSTEREMIKRFLRVVKEKDPDVLITYNGDNFDFAYLKKRCEKLGINFALGRDGSEPKIQRMGDRFAVEVKGRIHFDLYPVIRRTINLPTYTLEAVYEAVFGQPKEKVYAEEITTAWETGENLERVARYSMEDAKVTYELGKEFLPMEAQLSRLIGQSLWDVSRSSTGNLVEWFLLRKAYERNELAPNKPDEKELARRRQSYEGGYVKEPERGLWENIVYLDFRSLYPSIIITHNVSPDTLNREGCKEYDVAPQVGHRFCKDFPGFIPSLLGDLLEERQKIKKKMKATIDPIERKLLDYRQRAIKILANSYYGYYGYARARWYCKECAESVTAWGREYITMTIKEIEEKYGFKVIYSDTDGFFATIPGADAETVKKKAMEFLKYINAKLPGALELEYEGFYKRGFFVTKKKYAVIDEEGKITTRGLEIVRRDWSEIAKETQARVLEALLKDGDVEKAVRIVKEVTEKLSKYEVPPEKLVIHEQITRDLKDYKATGPHVAVAKRLAARGVKIRPGTVISYIVLKGSGRIGDRAIPFDEFDPTKHKYDAEYYIENQVLPAVERILRAFGYRKEDLRYQKTRQVGLSAWLKPKGT

SEQ ID NO: 2844 - protein, 774 aa, synthetic construct
MILDTDMITEDGKPVLRIFKKENGEFKIEYDRTFEPYFYALLKDDSAIEEVKKITAERHGTVVTVKRVEKVQKKFLGRPVEVWKLYFTHWQDIPAIHDKIREHPAVIDIYEYDIPFAKRYLIDKGLVPMEGDEELKMLAFDIETLYHEGEEFAEGPILMISYADEEGARVITWKNVDLPYVDVVSTEREMIKRFLRVVKEKDPDVLITYNGDNFDFAYLKKRCEKLGINFALGRDGSEPKIQRMGDRFAVEVKGRIHFDLYPVIRRTINLPTYTLEAVYEAVFGQPKEKVYAEEITTAWETGENLERVARYSMEDAKVTYELGKEFLPMEAQLSRLIGQSLWDVSRSSTGNLVEWFLLRKAYERNELAPNKPDEKELARRRQSYEGGYVKEPERGLWENIVYLDFRSLYPSIIITHNVSPDTLNREGCKEYDVAPQVGHRFCKDFPGFIPSLLGDLLEERQKIKKKMKATIDPIERKLLDYRQRAIKILANSYYGYYGYARARWYCKECAESVTAWGREYITMTIKEIEEKYGFKVIYSDTDGFFATIPGADAETVKKKAMEFLKYINAKLPGALELEYEGFYKRGFFVTKKKYAVIDEEGKITTRGLEIVRRDWSEIAKETQARVLEALLKDGDVEKAVRIVKEVTEKLSKYEVPPEKLVIHEQITRDLKDYKATGPHVAVAKRLAARGVKIRPGTVISYIVLKGSGRIGDRAIPFDEFDPTKHKYDAEYYIENQVLPAVERILRAFGYRKEDLRYQKTRQVGLSAWLKPKGT

SEQ ID NO: 2845 - protein, 774 aa, synthetic construct
MILDTDMITEDGKPVLRIFKKENGEFKIEYDRTFEPYFYALLKDDSAIEEVKKITAERHGTVVTVKRVEKVQKKFLGRPVEVWKLYFTHWQDIPAIWDKIREHPAVIDIYEYDIPFAKRYLIDKGLVPMEGDEELKMLAFDIETLYHEGEEFAEGPILMISYADEEGARVITWKNVDLPYVDVVSTEREMIKRFLRVVKEKDPDVLITYNGDNFDFAYLKKRCEKLGINFALGRDGSEPKIQRMGDRFAVEVKGRIHFDLYPVIRRTINLPTYTLEAVYEAVFGQPKEKVYAEEITTAWETGENLERVARYSMEDAKVTYELGKEFLPMEAQLSRLIGQSLWDVSRSSTGNLVEWFLLRKAYERNELAPNKPDEKELARRRQSYEGGYVKEPERGLWENIVYLDFRSLYPSIIITHNVSPDTLNREGCKEYDVAPQVGHRFCKDFPGFIPSLLGDLLEERQKIKKKMKATIDPIERKLLDYRQRAIKILANSYYGYYGYARARWYCKECAESVTAWGREYITMTIKEIEEKYGFKVIYSDTDGFFATIPGADAETVKKKAMEFLKYINAKLPGALELEYEGFYKRGFFVTKKKYAVIDEEGKITTRGLEIVRRDWSEIAKETQARVLEALLKDGDVEKAVRIVKEVTEKLSKYEVPPEKLVIHEQITRDLKDYKATGPHVAVAKRLAARGVKIRPGTVISYIVLKGSGRIGDRAIPFDEFDPTKHKYDAEYYIENQVLPAVERILRAFGYRKEDLRYQKTRQVGLSAWLKPKGT

SEQ ID NO: 2846 - protein, 774 aa, synthetic construct
MILDTDMITEDGKPVLRIFKKENGEFKIEYDRTFEPYFYALLKDDSAIEEVKKITAERHGTVVTVKRVEKVQKKFLGRPVEVWKLYFTHWQDQPAIRDKIREHPAVIDIYEYDIPFAKRYLIDKGLVPMEGDEELKMLAFDIETLYHEGEEFAEGPILMISYADEEGARVITWKNVDLPYVDVVSTEREMIKRFLRVVKEKDPDVLITYNGDNFDFAYLKKRCEKLGINFALGRDGSEPKIQRMGDRFAVEVKGRIHFDLYPVIRRTINLPTYTLEAVYEAVFGQPKEKVYAEEITTAWETGENLERVARYSMEDAKVTYELGKEFLPMEAQLSRLIGQSLWDVSRSSTGNLVEWFLLRKAYERNELAPNKPDEKELARRRQSYEGGYVKEPERGLWENIVYLDFRSLYPSIIITHNVSPDTLNREGCKEYDVAPQVGHRFCKDFPGFIPSLLGDLLEERQKIKKKMKATIDPIERKLLDYRQRAIKILANSYYGYYGYARARWYCKECAESVTAWGREYITMTIKEIEEKYGFKVIYSDTDGFFATIPGADAETVKKKAMEFLKYINAKLPGALELEYEGFYKRGFFVTKKKYAVIDEEGKITTRGLEIVRRDWSEIAKETQARVLEALLKDGDVEKAVRIVKEVTEKLSKYEVPPEKLVIHEQITRDLKDYKATGPHVAVAKRLAARGVKIRPGTVISYIVLKGSGRIGDRAIPFDEFDPTKHKYDAEYYIENQVLPAVERILRAFGYRKEDLRYQKTRQVGLSAWLKPKGT

SEQ ID NO: 2847 - protein, 774 aa, synthetic construct
MILDTDMITEDGKPVLRIFKKENGEFKIEYDRTFEPYFYALLKDDSAIEEVKKITAERHGTVVTVKRVEKVQKKFLGRPVEVWKLYFTHWQDQPAIADKIREHPAVIDIYEYDIPFAKRYLIDKGLVPMEGDEELKMLAFDIETLYHEGEEFAEGPILMISYADEEGARVITWKNVDLPYVDVVSTEREMIKRFLRVVKEKDPDVLITYNGDNFDFAYLKKRCEKLGINFALGRDGSEPKIQRMGDRFAVEVKGRIHFDLYPVIRRTINLPTYTLEAVYEAVFGQPKEKVYAEEITTAWETGENLERVARYSMEDAKVTYELGKEFLPMEAQLSRLIGQSLWDVSRSSTGNLVEWFLLRKAYERNELAPNKPDEKELARRRQSYEGGYVKEPERGLWENIVYLDFRSLYPSIIITHNVSPDTLNREGCKEYDVAPQVGHRFCKDFPGFIPSLLGDLLEERQKIKKKMKATIDPIERKLLDYRQRAIKILANSYYGYYGYARARWYCKECAESVTAWGREYITMTIKEIEEKYGFKVIYSDTDGFFATIPGADAETVKKKAMEFLKYINAKLPGALELEYEGFYKRGFFVTKKKYAVIDEEGKITTRGLEIVRRDWSEIAKETQARVLEALLKDGDVEKAVRIVKEVTEKLSKYEVPPEKLVIHEQITRDLKDYKATGPHVAVAKRLAARGVKIRPGTVISYIVLKGSGRIGDRAIPFDEFDPTKHKYDAEYYIENQVLPAVERILRAFGYRKEDLRYQKTRQVGLSAWLKPKGT

SEQ ID NO: 2848 - protein, 774 aa, synthetic construct
MILDTDMITEDGKPVLRIFKKENGEFKIEYDRTFEPYFYALLKDDSAIEEVKKITAERHGTVVTVKRVEKVQKKFLGRPVEVWKLYFTHWQDQPAIWDKIREHPAVIDIYEYDIPFAKRYLIDKGLVPMEGDEELKMLAFDIETLYHEGEEFAEGPILMISYADEEGARVITWKNVDLPYVDVVSTEREMIKRFLRVVKEKDPDVLITYNGDNFDFAYLKKRCEKLGINFALGRDGSEPKIQRMGDRFAVEVKGRIHFDLYPVIRRTINLPTYTLEAVYEAVFGQPKEKVYAEEITTAWETGENLERVARYSMEDAKVTYELGKEFLPMEAQLSRLIGQSLWDVSRSSTGNLVEWFLLRKAYERNELAPNKPDEKELARRRQSYEGGYVKEPERGLWENIVYLDFRSLYPSIIITHNVSPDTLNREGCKEYDVAPQVGHRFCKDFPGFIPSLLGDLLEERQKIKKKMKATIDPIERKLLDYRQRAIKILANSYYGYYGYARARWYCKECAESVTAWGREYITMTIKEIEEKYGFKVIYSDTDGFFATIPGADAETVKKKAMEFLKYINAKLPGALELEYEGFYKRGFFVTKKKYAVIDEEGKITTRGLEIVRRDWSEIAKETQARVLEALLKDGDVEKAVRIVKEVTEKLSKYEVPPEKLVIHEQITRDLKDYKATGPHVAVAKRLAARGVKIRPGTVISYIVLKGSGRIGDRAIPFDEFDPTKHKYDAEYYIENQVLPAVERILRAFGYRKEDLRYQKTRQVGLSAWLKPKGT

SEQ ID NO: 2849 - protein, 774 aa, synthetic construct
MILDTDMITEDGKPVLRIFKKENGEFKIEYDRTFEPYFYALLKDDSAIEEVKKITAERHGTVVTVKRVEKVQKKFLGRPVEVWKLYFTHWQDRPAIADKIREHPAVIDIYEYDIPFAKRYLIDKGLVPMEGDEELKMLAFDIETLYHEGEEFAEGPILMISYADEEGARVITWKNVDLPYVDVVSTEREMIKRFLRVVKEKDPDVLITYNGDNFDFAYLKKRCEKLGINFALGRDGSEPKIQRMGDRFAVEVKGRIHFDLYPVIRRTINLPTYTLEAVYEAVFGQPKEKVYAEEITTAWETGENLERVARYSMEDAKVTYELGKEFLPMEAQLSRLIGQSLWDVSRSSTGNLVEWFLLRKAYERNELAPNKPDEKELARRRQSYEGGYVKEPERGLWENIVYLDFRSLYPSIIITHNVSPDTLNREGCKEYDVAPQVGHRFCKDFPGFIPSLLGDLLEERQKIKKKMKATIDPIERKLLDYRQRAIKILANSYYGYYGYARARWYCKECAESVTAWGREYITMTIKEIEEKYGFKVIYSDTDGFFATIPGADAETVKKKAMEFLKYINAKLPGALELEYEGFYKRGFFVTKKKYAVIDEEGKITTRGLEIVRRDWSEIAKETQARVLEALLKDGDVEKAVRIVKEVTEKLSKYEVPPEKLVIHEQITRDLKDYKATGPHVAVAKRLAARGVKIRPGTVISYIVLKGSGRIGDRAIPFDEFDPTKHKYDAEYYIENQVLPAVERILRAFGYRKEDLRYQKTRQVGLSAWLKPKGT

SEQ ID NO: 2850 - protein, 774 aa, synthetic construct
MILDTDMITEDGKPVLRIFKKENGEFKIEYDRTFEPYFYALLKDDSAIEEVKKITAERHGTVVTVKRVEKVQKKFLGRPVEVWKLYFTHWQDRPAIFDKIREHPAVIDIYEYDIPFAKRYLIDKGLVPMEGDEELKMLAFDIETLYHEGEEFAEGPILMISYADEEGARVITWKNVDLPYVDVVSTEREMIKRFLRVVKEKDPDVLITYNGDNFDFAYLKKRCEKLGINFALGRDGSEPKIQRMGDRFAVEVKGRIHFDLYPVIRRTINLPTYTLEAVYEAVFGQPKEKVYAEEITTAWETGENLERVARYSMEDAKVTYELGKEFLPMEAQLSRLIGQSLWDVSRSSTGNLVEWFLLRKAYERNELAPNKPDEKELARRRQSYEGGYVKEPERGLWENIVYLDFRSLYPSIIITHNVSPDTLNREGCKEYDVAPQVGHRFCKDFPGFIPSLLGDLLEERQKIKKKMKATIDPIERKLLDYRQRAIKILANSYYGYYGYARARWYCKECAESVTAWGREYITMTIKEIEEKYGFKVIYSDTDGFFATIPGADAETVKKKAMEFLKYINAKLPGALELEYEGFYKRGFFVTKKKYAVIDEEGKITTRGLEIVRRDWSEIAKETQARVLEALLKDGDVEKAVRIVKEVTEKLSKYEVPPEKLVIHEQITRDLKDYKATGPHVAVAKRLAARGVKIRPGTVISYIVLKGSGRIGDRAIPFDEFDPTKHKYDAEYYIENQVLPAVERILRAFGYRKEDLRYQKTRQVGLSAWLKPKGT

SEQ ID NO: 2851 - protein, 774 aa, synthetic construct
MILDTDMITEDGKPVLRIFKKENGEFKIEYDRTFEPYFYALLKDDSAIEEVKKITAERHGTVVTVKRVEKVQKKFLGRPVEVWKLYFTHYQDVPAIRDKIREHPAVIDIYEYDIPFAKRYLIDKGLVPMEGDEELKMLAFDIETLYHEGEEFAEGPILMISYADEEGARVITWKNVDLPYVDVVSTEREMIKRFLRVVKEKDPDVLITYNGDNFDFAYLKKRCEKLGINFALGRDGSEPKIQRMGDRFAVEVKGRIHFDLYPVIRRTINLPTYTLEAVYEAVFGQPKEKVYAEEITTAWETGENLERVARYSMEDAKVTYELGKEFLPMEAQLSRLIGQSLWDVSRSSTGNLVEWFLLRKAYERNELAPNKPDEKELARRRQSYEGGYVKEPERGLWENIVYLDFRSLYPSIIITHNVSPDTLNREGCKEYDVAPQVGHRFCKDFPGFIPSLLGDLLEERQKIKKKMKATIDPIERKLLDYRQRAIKILANSYYGYYGYARARWYCKECAESVTAWGREYITMTIKEIEEKYGFKVIYSDTDGFFATIPGADAETVKKKAMEFLKYINAKLPGALELEYEGFYKRGFFVTKKKYAVIDEEGKITTRGLEIVRRDWSEIAKETQARVLEALLKDGDVEKAVRIVKEVTEKLSKYEVPPEKLVIHEQITRDLKDYKATGPHVAVAKRLAARGVKIRPGTVISYIVLKGSGRIGDRAIPFDEFDPTKHKYDAEYYIENQVLPAVERILRAFGYRKEDLRYQKTRQVGLSAWLKPKGT

SEQ ID NO: 2852 - protein, 774 aa, synthetic construct
MILDTDMITEDGKPVLRIFKKENGEFKIEYDRTFEPYFYALLKDDSAIEEVKKITAERHGTVVTVKRVEKVQKKFLGRPVEVWKLYFTHYQDVPAIADKIREHPAVIDIYEYDIPFAKRYLIDKGLVPMEGDEELKMLAFDIETLYHEGEEFAEGPILMISYADEEGARVITWKNVDLPYVDVVSTEREMIKRFLRVVKEKDPDVLITYNGDNFDFAYLKKRCEKLGINFALGRDGSEPKIQRMGDRFAVEVKGRIHFDLYPVIRRTINLPTYTLEAVYEAVFGQPKEKVYAEEITTAWETGENLERVARYSMEDAKVTYELGKEFLPMEAQLSRLIGQSLWDVSRSSTGNLVEWFLLRKAYERNELAPNKPDEKELARRRQSYEGGYVKEPERGLWENIVYLDFRSLYPSIIITHNVSPDTLNREGCKEYDVAPQVGHRFCKDFPGFIPSLLGDLLEERQKIKKKMKATIDPIERKLLDYRQRAIKILANSYYGYYGYARARWYCKECAESVTAWGREYITMTIKEIEEKYGFKVIYSDTDGFFATIPGADAETVKKKAMEFLKYINAKLPGALELEYEGFYKRGFFVTKKKYAVIDEEGKITTRGLEIVRRDWSEIAKETQARVLEALLKDGDVEKAVRIVKEVTEKLSKYEVPPEKLVIHEQITRDLKDYKATGPHVAVAKRLAARGVKIRPGTVISYIVLKGSGRIGDRAIPFDEFDPTKHKYDAEYYIENQVLPAVERILRAFGYRKEDLRYQKTRQVGLSAWLKPKGT

SEQ ID NO: 2853 - protein, 774 aa, synthetic construct
MILDTDMITEDGKPVLRIFKKENGEFKIEYDRTFEPYFYALLKDDSAIEEVKKITAERHGTVVTVKRVEKVQKKFLGRPVEVWKLYFTHYQDVPAIFDKIREHPAVIDIYEYDIPFAKRYLIDKGLVPMEGDEELKMLAFDIETLYHEGEEFAEGPILMISYADEEGARVITWKNVDLPYVDVVSTEREMIKRFLRVVKEKDPDVLITYNGDNFDFAYLKKRCEKLGINFALGRDGSEPKIQRMGDRFAVEVKGRIHFDLYPVIRRTINLPTYTLEAVYEAVFGQPKEKVYAEEITTAWETGENLERVARYSMEDAKVTYELGKEFLPMEAQLSRLIGQSLWDVSRSSTGNLVEWFLLRKAYERNELAPNKPDEKELARRRQSYEGGYVKEPERGLWENIVYLDFRSLYPSIIITHNVSPDTLNREGCKEYDVAPQVGHRFCKDFPGFIPSLLGDLLEERQKIKKKMKATIDPIERKLLDYRQRAIKILANSYYGYYGYARARWYCKECAESVTAWGREYITMTIKEIEEKYGFKVIYSDTDGFFATIPGADAETVKKKAMEFLKYINAKLPGALELEYEGFYKRGFFVTKKKYAVIDEEGKITTRGLEIVRRDWSEIAKETQARVLEALLKDGDVEKAVRIVKEVTEKLSKYEVPPEKLVIHEQITRDLKDYKATGPHVAVAKRLAARGVKIRPGTVISYIVLKGSGRIGDRAIPFDEFDPTKHKYDAEYYIENQVLPAVERILRAFGYRKEDLRYQKTRQVGLSAWLKPKGT

SEQ ID NO: 2854 - protein, 774 aa, synthetic construct
MILDTDMITEDGKPVLRIFKKENGEFKIEYDRTFEPYFYALLKDDSAIEEVKKITAERHGTVVTVKRVEKVQKKFLGRPVEVWKLYFTHYQDVPAIHDKIREHPAVIDIYEYDIPFAKRYLIDKGLVPMEGDEELKMLAFDIETLYHEGEEFAEGPILMISYADEEGARVITWKNVDLPYVDVVSTEREMIKRFLRVVKEKDPDVLITYNGDNFDFAYLKKRCEKLGINFALGRDGSEPKIQRMGDRFAVEVKGRIHFDLYPVIRRTINLPTYTLEAVYEAVFGQPKEKVYAEEITTAWETGENLERVARYSMEDAKVTYELGKEFLPMEAQLSRLIGQSLWDVSRSSTGNLVEWFLLRKAYERNELAPNKPDEKELARRRQSYEGGYVKEPERGLWENIVYLDFRSLYPSIIITHNVSPDTLNREGCKEYDVAPQVGHRFCKDFPGFIPSLLGDLLEERQKIKKKMKATIDPIERKLLDYRQRAIKILANSYYGYYGYARARWYCKECAESVTAWGREYITMTIKEIEEKYGFKVIYSDTDGFFATIPGADAETVKKKAMEFLKYINAKLPGALELEYEGFYKRGFFVTKKKYAVIDEEGKITTRGLEIVRRDWSEIAKETQARVLEALLKDGDVEKAVRIVKEVTEKLSKYEVPPEKLVIHEQITRDLKDYKATGPHVAVAKRLAARGVKIRPGTVISYIVLKGSGRIGDRAIPFDEFDPTKHKYDAEYYIENQVLPAVERILRAFGYRKEDLRYQKTRQVGLSAWLKPKGT

SEQ ID NO: 2855 - protein, 774 aa, synthetic construct
MILDTDMITEDGKPVLRIFKKENGEFKIEYDRTFEPYFYALLKDDSAIEEVKKITAERHGTVVTVKRVEKVQKKFLGRPVEVWKLYFTHYQDIPAIRDKIREHPAVIDIYEYDIPFAKRYLIDKGLVPMEGDEELKMLAFDIETLYHEGEEFAEGPILMISYADEEGARVITWKNVDLPYVDVVSTEREMIKRFLRVVKEKDPDVLITYNGDNFDFAYLKKRCEKLGINFALGRDGSEPKIQRMGDRFAVEVKGRIHFDLYPVIRRTINLPTYTLEAVYEAVFGQPKEKVYAEEITTAWETGENLERVARYSMEDAKVTYELGKEFLPMEAQLSRLIGQSLWDVSRSSTGNLVEWFLLRKAYERNELAPNKPDEKELARRRQSYEGGYVKEPERGLWENIVYLDFRSLYPSIIITHNVSPDTLNREGCKEYDVAPQVGHRFCKDFPGFIPSLLGDLLEERQKIKKKMKATIDPIERKLLDYRQRAIKILANSYYGYYGYARARWYCKECAESVTAWGREYITMTIKEIEEKYGFKVIYSDTDGFFATIPGADAETVKKKAMEFLKYINAKLPGALELEYEGFYKRGFFVTKKKYAVIDEEGKITTRGLEIVRRDWSEIAKETQARVLEALLKDGDVEKAVRIVKEVTEKLSKYEVPPEKLVIHEQITRDLKDYKATGPHVAVAKRLAARGVKIRPGTVISYIVLKGSGRIGDRAIPFDEFDPTKHKYDAEYYIENQVLPAVERILRAFGYRKEDLRYQKTRQVGLSAWLKPKGT

SEQ ID NO: 2856 - protein, 774 aa, synthetic construct
MILDTDMITEDGKPVLRIFKKENGEFKIEYDRTFEPYFYALLKDDSAIEEVKKITAERHGTVVTVKRVEKVQKKFLGRPVEVWKLYFTHYQDIPAIADKIREHPAVIDIYEYDIPFAKRYLIDKGLVPMEGDEELKMLAFDIETLYHEGEEFAEGPILMISYADEEGARVITWKNVDLPYVDVVSTEREMIKRFLRVVKEKDPDVLITYNGDNFDFAYLKKRCEKLGINFALGRDGSEPKIQRMGDRFAVEVKGRIHFDLYPVIRRTINLPTYTLEAVYEAVFGQPKEKVYAEEITTAWETGENLERVARYSMEDAKVTYELGKEFLPMEAQLSRLIGQSLWDVSRSSTGNLVEWFLLRKAYERNELAPNKPDEKELARRRQSYEGGYVKEPERGLWENIVYLDFRSLYPSIIITHNVSPDTLNREGCKEYDVAPQVGHRFCKDFPGFIPSLLGDLLEERQKIKKKMKATIDPIERKLLDYRQRAIKILANSYYGYYGYARARWYCKECAESVTAWGREYITMTIKEIEEKYGFKVIYSDTDGFFATIPGADAETVKKKAMEFLKYINAKLPGALELEYEGFYKRGFFVTKKKYAVIDEEGKITTRGLEIVRRDWSEIAKETQARVLEALLKDGDVEKAVRIVKEVTEKLSKYEVPPEKLVIHEQITRDLKDYKATGPHVAVAKRLAARGVKIRPGTVISYIVLKGSGRIGDRAIPFDEFDPTKHKYDAEYYIENQVLPAVERILRAFGYRKEDLRYQKTRQVGLSAWLKPKGT

SEQ ID NO: 2857 - protein, 774 aa, synthetic construct
MILDTDMITEDGKPVLRIFKKENGEFKIEYDRTFEPYFYALLKDDSAIEEVKKITAERHGTVVTVKRVEKVQKKFLGRPVEVWKLYFTHYQDIPAIFDKIREHPAVIDIYEYDIPFAKRYLIDKGLVPMEGDEELKMLAFDIETLYHEGEEFAEGPILMISYADEEGARVITWKNVDLPYVDVVSTEREMIKRFLRVVKEKDPDVLITYNGDNFDFAYLKKRCEKLGINFALGRDGSEPKIQRMGDRFAVEVKGRIHFDLYPVIRRTINLPTYTLEAVYEAVFGQPKEKVYAEEITTAWETGENLERVARYSMEDAKVTYELGKEFLPMEAQLSRLIGQSLWDVSRSSTGNLVEWFLLRKAYERNELAPNKPDEKELARRRQSYEGGYVKEPERGLWENIVYLDFRSLYPSIIITHNVSPDTLNREGCKEYDVAPQVGHRFCKDFPGFIPSLLGDLLEERQKIKKKMKATIDPIERKLLDYRQRAIKILANSYYGYYGYARARWYCKECAESVTAWGREYITMTIKEIEEKYGFKVIYSDTDGFFATIPGADAETVKKKAMEFLKYINAKLPGALELEYEGFYKRGFFVTKKKYAVIDEEGKITTRGLEIVRRDWSEIAKETQARVLEALLKDGDVEKAVRIVKEVTEKLSKYEVPPEKLVIHEQITRDLKDYKATGPHVAVAKRLAARGVKIRPGTVISYIVLKGSGRIGDRAIPFDEFDPTKHKYDAEYYIENQVLPAVERILRAFGYRKEDLRYQKTRQVGLSAWLKPKGT

SEQ ID NO: 2858 - protein, 774 aa, synthetic construct
MILDTDMITEDGKPVLRIFKKENGEFKIEYDRTFEPYFYALLKDDSAIEEVKKITAERHGTVVTVKRVEKVQKKFLGRPVEVWKLYFTHYQDIPAIHDKIREHPAVIDIYEYDIPFAKRYLIDKGLVPMEGDEELKMLAFDIETLYHEGEEFAEGPILMISYADEEGARVITWKNVDLPYVDVVSTEREMIKRFLRVVKEKDPDVLITYNGDNFDFAYLKKRCEKLGINFALGRDGSEPKIQRMGDRFAVEVKGRIHFDLYPVIRRTINLPTYTLEAVYEAVFGQPKEKVYAEEITTAWETGENLERVARYSMEDAKVTYELGKEFLPMEAQLSRLIGQSLWDVSRSSTGNLVEWFLLRKAYERNELAPNKPDEKELARRRQSYEGGYVKEPERGLWENIVYLDFRSLYPSIIITHNVSPDTLNREGCKEYDVAPQVGHRFCKDFPGFIPSLLGDLLEERQKIKKKMKATIDPIERKLLDYRQRAIKILANSYYGYYGYARARWYCKECAESVTAWGREYITMTIKEIEEKYGFKVIYSDTDGFFATIPGADAETVKKKAMEFLKYINAKLPGALELEYEGFYKRGFFVTKKKYAVIDEEGKITTRGLEIVRRDWSEIAKETQARVLEALLKDGDVEKAVRIVKEVTEKLSKYEVPPEKLVIHEQITRDLKDYKATGPHVAVAKRLAARGVKIRPGTVISYIVLKGSGRIGDRAIPFDEFDPTKHKYDAEYYIENQVLPAVERILRAFGYRKEDLRYQKTRQVGLSAWLKPKGT

SEQ ID NO: 2859 - protein, 774 aa, synthetic construct
MILDTDMITEDGKPVLRIFKKENGEFKIEYDRTFEPYFYALLKDDSAIEEVKKITAERHGTVVTVKRVEKVQKKFLGRPVEVWKLYFTHYQDIPAIWDKIREHPAVIDIYEYDIPFAKRYLIDKGLVPMEGDEELKMLAFDIETLYHEGEEFAEGPILMISYADEEGARVITWKNVDLPYVDVVSTEREMIKRFLRVVKEKDPDVLITYNGDNFDFAYLKKRCEKLGINFALGRDGSEPKIQRMGDRFAVEVKGRIHFDLYPVIRRTINLPTYTLEAVYEAVFGQPKEKVYAEEITTAWETGENLERVARYSMEDAKVTYELGKEFLPMEAQLSRLIGQSLWDVSRSSTGNLVEWFLLRKAYERNELAPNKPDEKELARRRQSYEGGYVKEPERGLWENIVYLDFRSLYPSIIITHNVSPDTLNREGCKEYDVAPQVGHRFCKDFPGFIPSLLGDLLEERQKIKKKMKATIDPIERKLLDYRQRAIKILANSYYGYYGYARARWYCKECAESVTAWGREYITMTIKEIEEKYGFKVIYSDTDGFFATIPGADAETVKKKAMEFLKYINAKLPGALELEYEGFYKRGFFVTKKKYAVIDEEGKITTRGLEIVRRDWSEIAKETQARVLEALLKDGDVEKAVRIVKEVTEKLSKYEVPPEKLVIHEQITRDLKDYKATGPHVAVAKRLAARGVKIRPGTVISYIVLKGSGRIGDRAIPFDEFDPTKHKYDAEYYIENQVLPAVERILRAFGYRKEDLRYQKTRQVGLSAWLKPKGT

SEQ ID NO: 2860 - protein, 774 aa, synthetic construct
MILDTDMITEDGKPVLRIFKKENGEFKIEYDRTFEPYFYALLKDDSAIEEVKKITAERHGTVVTVKRVEKVQKKFLGRPVEVWKLYFTHYQDQPAIRDKIREHPAVIDIYEYDIPFAKRYLIDKGLVPMEGDEELKMLAFDIETLYHEGEEFAEGPILMISYADEEGARVITWKNVDLPYVDVVSTEREMIKRFLRVVKEKDPDVLITYNGDNFDFAYLKKRCEKLGINFALGRDGSEPKIQRMGDRFAVEVKGRIHFDLYPVIRRTINLPTYTLEAVYEAVFGQPKEKVYAEEITTAWETGENLERVARYSMEDAKVTYELGKEFLPMEAQLSRLIGQSLWDVSRSSTGNLVEWFLLRKAYERNELAPNKPDEKELARRRQSYEGGYVKEPERGLWENIVYLDFRSLYPSIIITHNVSPDTLNREGCKEYDVAPQVGHRFCKDFPGFIPSLLGDLLEERQKIKKKMKATIDPIERKLLDYRQRAIKILANSYYGYYGYARARWYCKECAESVTAWGREYITMTIKEIEEKYGFKVIYSDTDGFFATIPGADAETVKKKAMEFLKYINAKLPGALELEYEGFYKRGFFVTKKKYAVIDEEGKITTRGLEIVRRDWSEIAKETQARVLEALLKDGDVEKAVRIVKEVTEKLSKYEVPPEKLVIHEQITRDLKDYKATGPHVAVAKRLAARGVKIRPGTVISYIVLKGSGRIGDRAIPFDEFDPTKHKYDAEYYIENQVLPAVERILRAFGYRKEDLRYQKTRQVGLSAWLKPKGT

SEQ ID NO: 2861 - protein, 774 aa, synthetic construct
MILDTDMITEDGKPVLRIFKKENGEFKIEYDRTFEPYFYALLKDDSAIEEVKKITAERHGTVVTVKRVEKVQKKFLGRPVEVWKLYFTHYQDQPAIADKIREHPAVIDIYEYDIPFAKRYLIDKGLVPMEGDEELKMLAFDIETLYHEGEEFAEGPILMISYADEEGARVITWKNVDLPYVDVVSTEREMIKRFLRVVKEKDPDVLITYNGDNFDFAYLKKRCEKLGINFALGRDGSEPKIQRMGDRFAVEVKGRIHFDLYPVIRRTINLPTYTLEAVYEAVFGQPKEKVYAEEITTAWETGENLERVARYSMEDAKVTYELGKEFLPMEAQLSRLIGQSLWDVSRSSTGNLVEWFLLRKAYERNELAPNKPDEKELARRRQSYEGGYVKEPERGLWENIVYLDFRSLYPSIIITHNVSPDTLNREGCKEYDVAPQVGHRFCKDFPGFIPSLLGDLLEERQKIKKKMKATIDPIERKLLDYRQRAIKILANSYYGYYGYARARWYCKECAESVTAWGREYITMTIKEIEEKYGFKVIYSDTDGFFATIPGADAETVKKKAMEFLKYINAKLPGALELEYEGFYKRGFFVTKKKYAVIDEEGKITTRGLEIVRRDWSEIAKETQARVLEALLKDGDVEKAVRIVKEVTEKLSKYEVPPEKLVIHEQITRDLKDYKATGPHVAVAKRLAARGVKIRPGTVISYIVLKGSGRIGDRAIPFDEFDPTKHKYDAEYYIENQVLPAVERILRAFGYRKEDLRYQKTRQVGLSAWLKPKGT

SEQ ID NO: 2862 - protein, 774 aa, synthetic construct
MILDTDMITEDGKPVLRIFKKENGEFKIEYDRTFEPYFYALLKDDSAIEEVKKITAERHGTVVTVKRVEKVQKKFLGRPVEVWKLYFTHYQDRPAIWDKIREHPAVIDIYEYDIPFAKRYLIDKGLVPMEGDEELKMLAFDIETLYHEGEEFAEGPILMISYADEEGARVITWKNVDLPYVDVVSTEREMIKRFLRVVKEKDPDVLITYNGDNFDFAYLKKRCEKLGINFALGRDGSEPKIQRMGDRFAVEVKGRIHFDLYPVIRRTINLPTYTLEAVYEAVFGQPKEKVYAEEITTAWETGENLERVARYSMEDAKVTYELGKEFLPMEAQLSRLIGQSLWDVSRSSTGNLVEWFLLRKAYERNELAPNKPDEKELARRRQSYEGGYVKEPERGLWENIVYLDFRSLYPSIIITHNVSPDTLNREGCKEYDVAPQVGHRFCKDFPGFIPSLLGDLLEERQKIKKKMKATIDPIERKLLDYRQRAIKILANSYYGYYGYARARWYCKECAESVTAWGREYITMTIKEIEEKYGFKVIYSDTDGFFATIPGADAETVKKKAMEFLKYINAKLPGALELEYEGFYKRGFFVTKKKYAVIDEEGKITTRGLEIVRRDWSEIAKETQARVLEALLKDGDVEKAVRIVKEVTEKLSKYEVPPEKLVIHEQITRDLKDYKATGPHVAVAKRLAARGVKIRPGTVISYIVLKGSGRIGDRAIPFDEFDPTKHKYDAEYYIENQVLPAVERILRAFGYRKEDLRYQKTRQVGLSAWLKPKGT

SEQ ID NO: 2863 - protein, 774 aa, synthetic construct
MILDTDMITEDGKPVLRIFKKENGEFKIEYDRTFEPYFYALLKDDSAIEEVKKITAERHGTVVTVKRVEKVQKKFLGRPVEVWKLYFTHPQDVPAIADKIREHPAVIDIYEYDIPFAKRYLIDKGLVPMEGDEELKMLAFDIETLYHEGEEFAEGPILMISYADEEGARVITWKNVDLPYVDVVSTEREMIKRFLRVVKEKDPDVLITYNGDNFDFAYLKKRCEKLGINFALGRDGSEPKIQRMGDRFAVEVKGRIHFDLYPVIRRTINLPTYTLEAVYEAVFGQPKEKVYAEEITTAWETGENLERVARYSMEDAKVTYELGKEFLPMEAQLSRLIGQSLWDVSRSSTGNLVEWFLLRKAYERNELAPNKPDEKELARRRQSYEGGYVKEPERGLWENIVYLDFRSLYPSIIITHNVSPDTLNREGCKEYDVAPQVGHRFCKDFPGFIPSLLGDLLEERQKIKKKMKATIDPIERKLLDYRQRAIKILANSYYGYYGYARARWYCKECAESVTAWGREYITMTIKEIEEKYGFKVIYSDTDGFFATIPGADAETVKKKAMEFLKYINAKLPGALELEYEGFYKRGFFVTKKKYAVIDEEGKITTRGLEIVRRDWSEIAKETQARVLEALLKDGDVEKAVRIVKEVTEKLSKYEVPPEKLVIHEQITRDLKDYKATGPHVAVAKRLAARGVKIRPGTVISYIVLKGSGRIGDRAIPFDEFDPTKHKYDAEYYIENQVLPAVERILRAFGYRKEDLRYQKTRQVGLSAWLKPKGT

SEQ ID NO: 2864 - protein, 774 aa, synthetic construct
MILDTDMITEDGKPVLRIFKKENGEFKIEYDRTFEPYFYALLKDDSAIEEVKKITAERHGTVVTVKRVEKVQKKFLGRPVEVWKLYFTHPQDVPAIADKIREHPAVIDIYEYDIPFAKMYLIDKGLVPMEGDEELKMLAFDIETLYHEGEEFAEGPILMISYADEEGARVITWKNVDLPYVDVVSTEREMIKRFLRVVKEKDPDVLITYNGDNFDFAYLKKRCEKLGINFALGRDGSEPKIQRMGDRFAVEVKGRIHFDLYPVIRRTINLPTYTLEAVYEAVFGQPKEKVYAEEITTAWETGENLERVARYSMEDAKVTYELGKEFLPMEAQLSRLIGQSLWDVSRSSTGNLVEWFLLRKAYERNELAPNKPDEKELARRRQSYEGGYVKEPERGLWENIVYLDFRSLYPSIIITHNVSPDTLNREGCKEYDVAPQVGHRFCKDFPGFIPSLLGDLLEERQKIKKKMKATIDPIERKLLDYRQRAIKILANSYYGYYGYARARWYCKECAESVTAWGREYITMTIKEIEEKYGFKVIYSDTDGFFATIPGADAETVKKKAMEFLKYINAKLPGALELEYEGFYKRGFFVTKKKYAVIDEEGKITTRGLEIVRRDWSEIAKETQARVLEALLKDGDVEKAVRIVKEVTEKLSKYEVPPEKLVIHEQITRDLKDYKATGPHVAVAKRLAARGVKIRPGTVISYIVLKGSGRIGDRAIPFDEFDPTKHKYDAEYYIENQVLPAVERILRAFGYRKEDLRYQKTRQVGLSAWLKPKGT

SEQ ID NO: 2865 - protein, 774 aa, synthetic construct
MILDTDMITEDGKPVLRIFKKENGEFKIEYDRTFEPYFYALLKDDSAIEEVKKITAERHGTVVTVKRVEKVQKKFLGRPVEVWKLYFTHPQDVPAIFDKIREHPAVIDIYEYDIPFAKRYLIDKGLVPMEGDEELKMLAFDIETLYHEGEEFAEGPILMISYADEEGARVITWKNVDLPYVDVVSTEREMIKRFLRVVKEKDPDVLITYNGDNFDFAYLKKRCEKLGINFALGRDGSEPKIQRMGDRFAVEVKGRIHFDLYPVIRRTINLPTYTLEAVYEAVFGQPKEKVYAEEITTAWETGENLERVARYSMEDAKVTYELGKEFLPMEAQLSRLIGQSLWDVSRSSTGNLVEWFLLRKAYERNELAPNKPDEKELARRRQSYEGGYVKEPERGLWENIVYLDFRSLYPSIIITHNVSPDTLNREGCKEYDVAPQVGHRFCKDFPGFIPSLLGDLLEERQKIKKKMKATIDPIERKLLDYRQRAIKILANSYYGYYGYARARWYCKECAESVTAWGREYITMTIKEIEEKYGFKVIYSDTDGFFATIPGADAETVKKKAMEFLKYINAKLPGALELEYEGFYKRGFFVTKKKYAVIDEEGKITTRGLEIVRRDWSEIAKETQARVLEALLKDGDVEKAVRIVKEVTEKLSKYEVPPEKLVIHEQITRDLKDYKATGPHVAVAKRLAARGVKIRPGTVISYIVLKGSGRIGDRAIPFDEFDPTKHKYDAEYYIENQVLPAVERILRAFGYRKEDLRYQKTRQVGLSAWLKPKGT

SEQ ID NO: 2866 - protein, 774 aa, synthetic construct
MILDTDMITEDGKPVLRIFKKENGEFKIEYDRTFEPYFYALLKDDSAIEEVKKITAERHGTVVTVKRVEKVQKKFLGRPVEVWKLYFTHPQDVPAIHDKIREHPAVIDIYEYDIPFAKRYLIDKGLVPMEGDEELKMLAFDIETLYHEGEEFAEGPILMISYADEEGARVITWKNVDLPYVDVVSTEREMIKRFLRVVKEKDPDVLITYNGDNFDFAYLKKRCEKLGINFALGRDGSEPKIQRMGDRFAVEVKGRIHFDLYPVIRRTINLPTYTLEAVYEAVFGQPKEKVYAEEITTAWETGENLERVARYSMEDAKVTYELGKEFLPMEAQLSRLIGQSLWDVSRSSTGNLVEWFLLRKAYERNELAPNKPDEKELARRRQSYEGGYVKEPERGLWENIVYLDFRSLYPSIIITHNVSPDTLNREGCKEYDVAPQVGHRFCKDFPGFIPSLLGDLLEERQKIKKKMKATIDPIERKLLDYRQRAIKILANSYYGYYGYARARWYCKECAESVTAWGREYITMTIKEIEEKYGFKVIYSDTDGFFATIPGADAETVKKKAMEFLKYINAKLPGALELEYEGFYKRGFFVTKKKYAVIDEEGKITTRGLEIVRRDWSEIAKETQARVLEALLKDGDVEKAVRIVKEVTEKLSKYEVPPEKLVIHEQITRDLKDYKATGPHVAVAKRLAARGVKIRPGTVISYIVLKGSGRIGDRAIPFDEFDPTKHKYDAEYYIENQVLPAVERILRAFGYRKEDLRYQKTRQVGLSAWLKPKGT

SEQ ID NO: 2867 - protein, 774 aa, synthetic construct
MILDTDMITEDGKPVLRIFKKENGEFKIEYDRTFEPYFYALLKDDSAIEEVKKITAERHGTVVTVKRVEKVQKKFLGRPVEVWKLYFTHPQDVPAIWDKIREHPAVIDIYEYDIPFAKRYLIDKGLVPMEGDEELKMLAFDIETLYHEGEEFAEGPILMISYADEEGARVITWKNVDLPYVDVVSTEREMIKRFLRVVKEKDPDVLITYNGDNFDFAYLKKRCEKLGINFALGRDGSEPKIQRMGDRFAVEVKGRIHFDLYPVIRRTINLPTYTLEAVYEAVFGQPKEKVYAEEITTAWETGENLERVARYSMEDAKVTYELGKEFLPMEAQLSRLIGQSLWDVSRSSTGNLVEWFLLRKAYERNELAPNKPDEKELARRRQSYEGGYVKEPERGLWENIVYLDFRSLYPSIIITHNVSPDTLNREGCKEYDVAPQVGHRFCKDFPGFIPSLLGDLLEERQKIKKKMKATIDPIERKLLDYRQRAIKILANSYYGYYGYARARWYCKECAESVTAWGREYITMTIKEIEEKYGFKVIYSDTDGFFATIPGADAETVKKKAMEFLKYINAKLPGALELEYEGFYKRGFFVTKKKYAVIDEEGKITTRGLEIVRRDWSEIAKETQARVLEALLKDGDVEKAVRIVKEVTEKLSKYEVPPEKLVIHEQITRDLKDYKATGPHVAVAKRLAARGVKIRPGTVISYIVLKGSGRIGDRAIPFDEFDPTKHKYDAEYYIENQVLPAVERILRAFGYRKEDLRYQKTRQVGLSAWLKPKGT

SEQ ID NO: 2868 - protein, 774 aa, synthetic construct
MILDTDMITEDGKPVLRIFKKENGEFKIEYDRTFEPYFYALLKDDSAIEEVKKITAERHGTVVTVKRVEKVQKKFLGRPVEVWKLYFTHPQDEPAIRDKIREHPAVIDIYEYDIPFAKRYLIDKGLVPMEGDEELKMLAFDIETLYHEGEEFAEGPILMISYADEEGARVITWKNVDLPYVDVVSTEREMIKRFLRVVKEKDPDVLITYNGDNFDFAYLKKRCEKLGINFALGRDGSEPKIQRMGDRFAVEVKGRIHFDLYPVIRRTINLPTYTLEAVYEAVFGQPKEKVYAEEITTAWETGENLERVARYSMEDAKVTYELGKEFLPMEAQLSRLIGQSLWDVSRSSTGNLVEWFLLRKAYERNELAPNKPDEKELARRRQSYEGGYVKEPERGLWENIVYLDFRSLYPSIIITHNVSPDTLNREGCKEYDVAPQVGHRFCKDFPGFIPSLLGDLLEERQKIKKKMKATIDPIERKLLDYRQRAIKILANSYYGYYGYARARWYCKECAESVTAWGREYITMTIKEIEEKYGFKVIYSDTDGFFATIPGADAETVKKKAMEFLKYINAKLPGALELEYEGFYKRGFFVTKKKYAVIDEEGKITTRGLEIVRRDWSEIAKETQARVLEALLKDGDVEKAVRIVKEVTEKLSKYEVPPEKLVIHEQITRDLKDYKATGPHVAVAKRLAARGVKIRPGTVISYIVLKGSGRIGDRAIPFDEFDPTKHKYDAEYYIENQVLPAVERILRAFGYRKEDLRYQKTRQVGLSAWLKPKGT

SEQ ID NO: 2869 - protein, 774 aa, synthetic construct
MILDTDMITEDGKPVLRIFKKENGEFKIEYDRTFEPYFYALLKDDSAIEEVKKITAERHGTVVTVKRVEKVQKKFLGRPVEVWKLYFTHPQDIPAIRDKIREHPAVIDIYEYDIPFAKRYLIDKGLVPMEGDEELKMLAFDIETLYHEGEEFAEGPILMISYADEEGARVITWKNVDLPYVDVVSTEREMIKRFLRVVKEKDPDVLITYNGDNFDFAYLKKRCEKLGINFALGRDGSEPKIQRMGDRFAVEVKGRIHFDLYPVIRRTINLPTYTLEAVYEAVFGQPKEKVYAEEITTAWETGENLERVARYSMEDAKVTYELGKEFLPMEAQLSRLIGQSLWDVSRSSTGNLVEWFLLRKAYERNELAPNKPDEKELARRRQSYEGGYVKEPERGLWENIVYLDFRSLYPSIIITHNVSPDTLNREGCKEYDVAPQVGHRFCKDFPGFIPSLLGDLLEERQKIKKKMKATIDPIERKLLDYRQRAIKILANSYYGYYGYARARWYCKECAESVTAWGREYITMTIKEIEEKYGFKVIYSDTDGFFATIPGADAETVKKKAMEFLKYINAKLPGALELEYEGFYKRGFFVTKKKYAVIDEEGKITTRGLEIVRRDWSEIAKETQARVLEALLKDGDVEKAVRIVKEVTEKLSKYEVPPEKLVIHEQITRDLKDYKATGPHVAVAKRLAARGVKIRPGTVISYIVLKGSGRIGDRAIPFDEFDPTKHKYDAEYYIENQVLPAVERILRAFGYRKEDLRYQKTRQVGLSAWLKPKGT

SEQ ID NO: 2870 - protein, 774 aa, synthetic construct
MILDTDMITEDGKPVLRIFKKENGEFKIEYDRTFEPYFYALLKDDSAIEEVKKITAERHGTVVTVKRVEKVQKKFLGRPVEVWKLYFTHPQDIPAIADKIREHPAVIDIYEYDIPFAKRYLIDKGLVPMEGDEELKMLAFDIETLYHEGEEFAEGPILMISYADEEGARVITWKNVDLPYVDVVSTEREMIKRFLRVVKEKDPDVLITYNGDNFDFAYLKKRCEKLGINFALGRDGSEPKIQRMGDRFAVEVKGRIHFDLYPVIRRTINLPTYTLEAVYEAVFGQPKEKVYAEEITTAWETGENLERVARYSMEDAKVTYELGKEFLPMEAQLSRLIGQSLWDVSRSSTGNLVEWFLLRKAYERNELAPNKPDEKELARRRQSYEGGYVKEPERGLWENIVYLDFRSLYPSIIITHNVSPDTLNREGCKEYDVAPQVGHRFCKDFPGFIPSLLGDLLEERQKIKKKMKATIDPIERKLLDYRQRAIKILANSYYGYYGYARARWYCKECAESVTAWGREYITMTIKEIEEKYGFKVIYSDTDGFFATIPGADAETVKKKAMEFLKYINAKLPGALELEYEGFYKRGFFVTKKKYAVIDEEGKITTRGLEIVRRDWSEIAKETQARVLEALLKDGDVEKAVRIVKEVTEKLSKYEVPPEKLVIHEQITRDLKDYKATGPHVAVAKRLAARGVKIRPGTVISYIVLKGSGRIGDRAIPFDEFDPTKHKYDAEYYIENQVLPAVERILRAFGYRKEDLRYQKTRQVGLSAWLKPKGT

SEQ ID NO: 2871 - protein, 774 aa, synthetic construct
MILDTDMITEDGKPVLRIFKKENGEFKIEYDRTFEPYFYALLKDDSAIEEVKKITAERHGTVVTVKRVEKVQKKFLGRPVEVWKLYFTHPQDIPAIFDKIREHPAVIDIYEYDIPFAKRYLIDKGLVPMEGDEELKMLAFDIETLYHEGEEFAEGPILMISYADEEGARVITWKNVDLPYVDVVSTEREMIKRFLRVVKEKDPDVLITYNGDNFDFAYLKKRCEKLGINFALGRDGSEPKIQRMGDRFAVEVKGRIHFDLYPVIRRTINLPTYTLEAVYEAVFGQPKEKVYAEEITTAWETGENLERVARYSMEDAKVTYELGKEFLPMEAQLSRLIGQSLWDVSRSSTGNLVEWFLLRKAYERNELAPNKPDEKELARRRQSYEGGYVKEPERGLWENIVYLDFRSLYPSIIITHNVSPDTLNREGCKEYDVAPQVGHRFCKDFPGFIPSLLGDLLEERQKIKKKMKATIDPIERKLLDYRQRAIKILANSYYGYYGYARARWYCKECAESVTAWGREYITMTIKEIEEKYGFKVIYSDTDGFFATIPGADAETVKKKAMEFLKYINAKLPGALELEYEGFYKRGFFVTKKKYAVIDEEGKITTRGLEIVRRDWSEIAKETQARVLEALLKDGDVEKAVRIVKEVTEKLSKYEVPPEKLVIHEQITRDLKDYKATGPHVAVAKRLAARGVKIRPGTVISYIVLKGSGRIGDRAIPFDEFDPTKHKYDAEYYIENQVLPAVERILRAFGYRKEDLRYQKTRQVGLSAWLKPKGT

SEQ ID NO: 2872 - protein, 774 aa, synthetic construct
MILDTDMITEDGKPVLRIFKKENGEFKIEYDRTFEPYFYALLKDDSAIEEVKKITAERHGTVVTVKRVEKVQKKFLGRPVEVWKLYFTHPQDIPAIHDKIREHPAVIDIYEYDIPFAKRYLIDKGLVPMEGDEELKMLAFDIETLYHEGEEFAEGPILMISYADEEGARVITWKNVDLPYVDVVSTEREMIKRFLRVVKEKDPDVLITYNGDNFDFAYLKKRCEKLGINFALGRDGSEPKIQRMGDRFAVEVKGRIHFDLYPVIRRTINLPTYTLEAVYEAVFGQPKEKVYAEEITTAWETGENLERVARYSMEDAKVTYELGKEFLPMEAQLSRLIGQSLWDVSRSSTGNLVEWFLLRKAYERNELAPNKPDEKELARRRQSYEGGYVKEPERGLWENIVYLDFRSLYPSIIITHNVSPDTLNREGCKEYDVAPQVGHRFCKDFPGFIPSLLGDLLEERQKIKKKMKATIDPIERKLLDYRQRAIKILANSYYGYYGYARARWYCKECAESVTAWGREYITMTIKEIEEKYGFKVIYSDTDGFFATIPGADAETVKKKAMEFLKYINAKLPGALELEYEGFYKRGFFVTKKKYAVIDEEGKITTRGLEIVRRDWSEIAKETQARVLEALLKDGDVEKAVRIVKEVTEKLSKYEVPPEKLVIHEQITRDLKDYKATGPHVAVAKRLAARGVKIRPGTVISYIVLKGSGRIGDRAIPFDEFDPTKHKYDAEYYIENQVLPAVERILRAFGYRKEDLRYQKTRQVGLSAWLKPKGT

SEQ ID NO: 2873 - protein, 774 aa, synthetic construct
MILDTDMITEDGKPVLRIFKKENGEFKIEYDRTFEPYFYALLKDDSAIEEVKKITAERHGTVVTVKRVEKVQKKFLGRPVEVWKLYFTHPQDIPAIPDKIREHPAVIDIYEYDIPFAKRYLIDKGLVPMEGDEELKMLAFDIETLYHEGEEFAEGPILMISYADEEGARVITWKNVDLPYVDVVSTEREMIKRFLRVVKEKDPDVLITYNGDNFDFAYLKKRCEKLGINFALGRDGSEPKIQRMGDRFAVEVKGRIHFDLYPVIRRTINLPTYTLEAVYEAVFGQPKEKVYAEEITTAWETGENLERVARYSMEDAKVTYELGKEFLPMEAQLSRLIGQSLWDVSRSSTGNLVEWFLLRKAYERNELAPNKPDEKELARRRQSYEGGYVKEPERGLWENIVYLDFRSLYPSIIITHNVSPDTLNREGCKEYDVAPQVGHRFCKDFPGFIPSLLGDLLEERQKIKKKMKATIDPIERKLLDYRQRAIKILANSYYGYYGYARARWYCKECAESVTAWGREYITMTIKEIEEKYGFKVIYSDTDGFFATIPGADAETVKKKAMEFLKYINAKLPGALELEYEGFYKRGFFVTKKKYAVIDEEGKITTRGLEIVRRDWSEIAKETQARVLEALLKDGDVEKAVRIVKEVTEKLSKYEVPPEKLVIHEQITRDLKDYKATGPHVAVAKRLAARGVKIRPGTVISYIVLKGSGRIGDRAIPFDEFDPTKHKYDAEYYIENQVLPAVERILRAFGYRKEDLRYQKTRQVGLSAWLKPKGT

SEQ ID NO: 2874 - protein, 774 aa, synthetic construct
MILDTDMITEDGKPVLRIFKKENGEFKIEYDRTFEPYFYALLKDDSAIEEVKKITAERHGTVVTVKRVEKVQKKFLGRPVEVWKLYFTHPQDIPAIWDKIREHPAVIDIYEYDIPFAKRYLIDKGLVPMEGDEELKMLAFDIETLYHEGEEFAEGPILMISYADEEGARVITWKNVDLPYVDVVSTEREMIKRFLRVVKEKDPDVLITYNGDNFDFAYLKKRCEKLGINFALGRDGSEPKIQRMGDRFAVEVKGRIHFDLYPVIRRTINLPTYTLEAVYEAVFGQPKEKVYAEEITTAWETGENLERVARYSMEDAKVTYELGKEFLPMEAQLSRLIGQSLWDVSRSSTGNLVEWFLLRKAYERNELAPNKPDEKELARRRQSYEGGYVKEPERGLWENIVYLDFRSLYPSIIITHNVSPDTLNREGCKEYDVAPQVGHRFCKDFPGFIPSLLGDLLEERQKIKKKMKATIDPIERKLLDYRQRAIKILANSYYGYYGYARARWYCKECAESVTAWGREYITMTIKEIEEKYGFKVIYSDTDGFFATIPGADAETVKKKAMEFLKYINAKLPGALELEYEGFYKRGFFVTKKKYAVIDEEGKITTRGLEIVRRDWSEIAKETQARVLEALLKDGDVEKAVRIVKEVTEKLSKYEVPPEKLVIHEQITRDLKDYKATGPHVAVAKRLAARGVKIRPGTVISYIVLKGSGRIGDRAIPFDEFDPTKHKYDAEYYIENQVLPAVERILRAFGYRKEDLRYQKTRQVGLSAWLKPKGT

SEQ ID NO: 2875 - protein, 774 aa, synthetic construct
MILDTDMITEDGKPVLRIFKKENGEFKIEYDRTFEPYFYALLKDDSAIEEVKKITAERHGTVVTVKRVEKVQKKFLGRPVEVWKLYFTHPQDKPAIRDKIREHPAVIDIYEYDIPFAKRYLIDKGLVPMEGDEELKMLAFDIETLYHEGEEFAEGPILMISYADEEGARVITWKNVDLPYVDVVSTEREMIKRFLRVVKEKDPDVLITYNGDNFDFAYLKKRCEKLGINFALGRDGSEPKIQRMGDRFAVEVKGRIHFDLYPVIRRTINLPTYTLEAVYEAVFGQPKEKVYAEEITTAWETGENLERVARYSMEDAKVTYELGKEFLPMEAQLSRLIGQSLWDVSRSSTGNLVEWFLLRKAYERNELAPNKPDEKELARRRQSYEGGYVKEPERGLWENIVYLDFRSLYPSIIITHNVSPDTLNREGCKEYDVAPQVGHRFCKDFPGFIPSLLGDLLEERQKIKKKMKATIDPIERKLLDYRQRAIKILANSYYGYYGYARARWYCKECAESVTAWGREYITMTIKEIEEKYGFKVIYSDTDGFFATIPGADAETVKKKAMEFLKYINAKLPGALELEYEGFYKRGFFVTKKKYAVIDEEGKITTRGLEIVRRDWSEIAKETQARVLEALLKDGDVEKAVRIVKEVTEKLSKYEVPPEKLVIHEQITRDLKDYKATGPHVAVAKRLAARGVKIRPGTVISYIVLKGSGRIGDRAIPFDEFDPTKHKYDAEYYIENQVLPAVERILRAFGYRKEDLRYQKTRQVGLSAWLKPKGT

SEQ ID NO: 2876 - protein, 774 aa, synthetic construct
MILDTDMITEDGKPVLRIFKKENGEFKIEYDRTFEPYFYALLKDDSAIEEVKKITAERHGTVVTVKRVEKVQKKFLGRPVEVWKLYFTHPQDKPAIADKIREHPAVIDIYEYDIPFAKRYLIDKGLVPMEGDEELKMLAFDIETLYHEGEEFAEGPILMISYADEEGARVITWKNVDLPYVDVVSTEREMIKRFLRVVKEKDPDVLITYNGDNFDFAYLKKRCEKLGINFALGRDGSEPKIQRMGDRFAVEVKGRIHFDLYPVIRRTINLPTYTLEAVYEAVFGQPKEKVYAEEITTAWETGENLERVARYSMEDAKVTYELGKEFLPMEAQLSRLIGQSLWDVSRSSTGNLVEWFLLRKAYERNELAPNKPDEKELARRRQSYEGGYVKEPERGLWENIVYLDFRSLYPSIIITHNVSPDTLNREGCKEYDVAPQVGHRFCKDFPGFIPSLLGDLLEERQKIKKKMKATIDPIERKLLDYRQRAIKILANSYYGYYGYARARWYCKECAESVTAWGREYITMTIKEIEEKYGFKVIYSDTDGFFATIPGADAETVKKKAMEFLKYINAKLPGALELEYEGFYKRGFFVTKKKYAVIDEEGKITTRGLEIVRRDWSEIAKETQARVLEALLKDGDVEKAVRIVKEVTEKLSKYEVPPEKLVIHEQITRDLKDYKATGPHVAVAKRLAARGVKIRPGTVISYIVLKGSGRIGDRAIPFDEFDPTKHKYDAEYYIENQVLPAVERILRAFGYRKEDLRYQKTRQVGLSAWLKPKGT

SEQ ID NO: 2877 - protein, 774 aa, synthetic construct
MILDTDMITEDGKPVLRIFKKENGEFKIEYDRTFEPYFYALLKDDSAIEEVKKITAERHGTVVTVKRVEKVQKKFLGRPVEVWKLYFTHPQDKPAIFDKIREHPAVIDIYEYDIPFAKRYLIDKGLVPMEGDEELKMLAFDIETLYHEGEEFAEGPILMISYADEEGARVITWKNVDLPYVDVVSTEREMIKRFLRVVKEKDPDVLITYNGDNFDFAYLKKRCEKLGINFALGRDGSEPKIQRMGDRFAVEVKGRIHFDLYPVIRRTINLPTYTLEAVYEAVFGQPKEKVYAEEITTAWETGENLERVARYSMEDAKVTYELGKEFLPMEAQLSRLIGQSLWDVSRSSTGNLVEWFLLRKAYERNELAPNKPDEKELARRRQSYEGGYVKEPERGLWENIVYLDFRSLYPSIIITHNVSPDTLNREGCKEYDVAPQVGHRFCKDFPGFIPSLLGDLLEERQKIKKKMKATIDPIERKLLDYRQRAIKILANSYYGYYGYARARWYCKECAESVTAWGREYITMTIKEIEEKYGFKVIYSDTDGFFATIPGADAETVKKKAMEFLKYINAKLPGALELEYEGFYKRGFFVTKKKYAVIDEEGKITTRGLEIVRRDWSEIAKETQARVLEALLKDGDVEKAVRIVKEVTEKLSKYEVPPEKLVIHEQITRDLKDYKATGPHVAVAKRLAARGVKIRPGTVISYIVLKGSGRIGDRAIPFDEFDPTKHKYDAEYYIENQVLPAVERILRAFGYRKEDLRYQKTRQVGLSAWLKPKGT

SEQ ID NO: 2878 - protein, 774 aa, synthetic construct
MILDTDMITEDGKPVLRIFKKENGEFKIEYDRTFEPYFYALLKDDSAIEEVKKITAERHGTVVTVKRVEKVQKKFLGRPVEVWKLYFTHPQDQPAIRDKIREHPAVIDIYEYDIPFAKRYLIDKGLVPMEGDEELKMLAFDIETLYHEGEEFAEGPILMISYADEEGARVITWKNVDLPYVDVVSTEREMIKRFLRVVKEKDPDVLITYNGDNFDFAYLKKRCEKLGINFALGRDGSEPKIQRMGDRFAVEVKGRIHFDLYPVIRRTINLPTYTLEAVYEAVFGQPKEKVYAEEITTAWETGENLERVARYSMEDAKVTYELGKEFLPMEAQLSRLIGQSLWDVSRSSTGNLVEWFLLRKAYERNELAPNKPDEKELARRRQSYEGGYVKEPERGLWENIVYLDFRSLYPSIIITHNVSPDTLNREGCKEYDVAPQVGHRFCKDFPGFIPSLLGDLLEERQKIKKKMKATIDPIERKLLDYRQRAIKILANSYYGYYGYARARWYCKECAESVTAWGREYITMTIKEIEEKYGFKVIYSDTDGFFATIPGADAETVKKKAMEFLKYINAKLPGALELEYEGFYKRGFFVTKKKYAVIDEEGKITTRGLEIVRRDWSEIAKETQARVLEALLKDGDVEKAVRIVKEVTEKLSKYEVPPEKLVIHEQITRDLKDYKATGPHVAVAKRLAARGVKIRPGTVISYIVLKGSGRIGDRAIPFDEFDPTKHKYDAEYYIENQVLPAVERILRAFGYRKEDLRYQKTRQVGLSAWLKPKGT

SEQ ID NO: 2879 - protein, 774 aa, synthetic construct
MILDTDMITEDGKPVLRIFKKENGEFKIEYDRTFEPYFYALLKDDSAIEEVKKITAERHGTVVTVKRVEKVQKKFLGRPVEVWKLYFTHPQDQPAIADKIREHPAVIDIYEYDIPFAKRYLIDKGLVPMEGDEELKMLAFDIETLYHEGEEFAEGPILMISYADEEGARVITWKNVDLPYVDVVSTEREMIKRFLRVVKEKDPDVLITYNGDNFDFAYLKKRCEKLGINFALGRDGSEPKIQRMGDRFAVEVKGRIHFDLYPVIRRTINLPTYTLEAVYEAVFGQPKEKVYAEEITTAWETGENLERVARYSMEDAKVTYELGKEFLPMEAQLSRLIGQSLWDVSRSSTGNLVEWFLLRKAYERNELAPNKPDEKELARRRQSYEGGYVKEPERGLWENIVYLDFRSLYPSIIITHNVSPDTLNREGCKEYDVAPQVGHRFCKDFPGFIPSLLGDLLEERQKIKKKMKATIDPIERKLLDYRQRAIKILANSYYGYYGYARARWYCKECAESVTAWGREYITMTIKEIEEKYGFKVIYSDTDGFFATIPGADAETVKKKAMEFLKYINAKLPGALELEYEGFYKRGFFVTKKKYAVIDEEGKITTRGLEIVRRDWSEIAKETQARVLEALLKDGDVEKAVRIVKEVTEKLSKYEVPPEKLVIHEQITRDLKDYKATGPHVAVAKRLAARGVKIRPGTVISYIVLKGSGRIGDRAIPFDEFDPTKHKYDAEYYIENQVLPAVERILRAFGYRKEDLRYQKTRQVGLSAWLKPKGT

SEQ ID NO: 2880 - protein, 774 aa, synthetic construct
MILDTDMITEDGKPVLRIFKKENGEFKIEYDRTFEPYFYALLKDDSAIEEVKKITAERHGTVVTVKRVEKVQKKFLGRPVEVWKLYFTHPQDQPAIHDKIREHPAVIDIYEYDIPFAKRYLIDKGLVPMEGDEELKMLAFDIETLYHEGEEFAEGPILMISYADEEGARVITWKNVDLPYVDVVSTEREMIKRFLRVVKEKDPDVLITYNGDNFDFAYLKKRCEKLGINFALGRDGSEPKIQRMGDRFAVEVKGRIHFDLYPVIRRTINLPTYTLEAVYEAVFGQPKEKVYAEEITTAWETGENLERVARYSMEDAKVTYELGKEFLPMEAQLSRLIGQSLWDVSRSSTGNLVEWFLLRKAYERNELAPNKPDEKELARRRQSYEGGYVKEPERGLWENIVYLDFRSLYPSIIITHNVSPDTLNREGCKEYDVAPQVGHRFCKDFPGFIPSLLGDLLEERQKIKKKMKATIDPIERKLLDYRQRAIKILANSYYGYYGYARARWYCKECAESVTAWGREYITMTIKEIEEKYGFKVIYSDTDGFFATIPGADAETVKKKAMEFLKYINAKLPGALELEYEGFYKRGFFVTKKKYAVIDEEGKITTRGLEIVRRDWSEIAKETQARVLEALLKDGDVEKAVRIVKEVTEKLSKYEVPPEKLVIHEQITRDLKDYKATGPHVAVAKRLAARGVKIRPGTVISYIVLKGSGRIGDRAIPFDEFDPTKHKYDAEYYIENQVLPAVERILRAFGYRKEDLRYQKTRQVGLSAWLKPKGT

SEQ ID NO: 2881 - protein, 774 aa, synthetic construct
MILDTDMITEDGKPVLRIFKKENGEFKIEYDRTFEPYFYALLKDDSAIEEVKKITAERHGTVVTVKRVEKVQKKFLGRPVEVWKLYFTHPQDQPAIWDKIREHPAVIDIYEYDIPFAKRYLIDKGLVPMEGDEELKMLAFDIETLYHEGEEFAEGPILMISYADEEGARVITWKNVDLPYVDVVSTEREMIKRFLRVVKEKDPDVLITYNGDNFDFAYLKKRCEKLGINFALGRDGSEPKIQRMGDRFAVEVKGRIHFDLYPVIRRTINLPTYTLEAVYEAVFGQPKEKVYAEEITTAWETGENLERVARYSMEDAKVTYELGKEFLPMEAQLSRLIGQSLWDVSRSSTGNLVEWFLLRKAYERNELAPNKPDEKELARRRQSYEGGYVKEPERGLWENIVYLDFRSLYPSIIITHNVSPDTLNREGCKEYDVAPQVGHRFCKDFPGFIPSLLGDLLEERQKIKKKMKATIDPIERKLLDYRQRAIKILANSYYGYYGYARARWYCKECAESVTAWGREYITMTIKEIEEKYGFKVIYSDTDGFFATIPGADAETVKKKAMEFLKYINAKLPGALELEYEGFYKRGFFVTKKKYAVIDEEGKITTRGLEIVRRDWSEIAKETQARVLEALLKDGDVEKAVRIVKEVTEKLSKYEVPPEKLVIHEQITRDLKDYKATGPHVAVAKRLAARGVKIRPGTVISYIVLKGSGRIGDRAIPFDEFDPTKHKYDAEYYIENQVLPAVERILRAFGYRKEDLRYQKTRQVGLSAWLKPKGT

SEQ ID NO: 2882 - protein, 774 aa, synthetic construct
MILDTDMITEDGKPVLRIFKKENGEFKIEYDRTFEPYFYALLKDDSAIEEVKKITAERHGTVVTVKRVEKVQKKFLGRPVEVWKLYFTHPQDRPAIRDKIREHPAVIDIYEYDIPFAKRYLIDKGLVPMEGDEELKMLAFDIETLYHEGEEFAEGPILMISYADEEGARVITWKNVDLPYVDVVSTEREMIKRFLRVVKEKDPDVLITYNGDNFDFAYLKKRCEKLGINFALGRDGSEPKIQRMGDRFAVEVKGRIHFDLYPVIRRTINLPTYTLEAVYEAVFGQPKEKVYAEEITTAWETGENLERVARYSMEDAKVTYELGKEFLPMEAQLSRLIGQSLWDVSRSSTGNLVEWFLLRKAYERNELAPNKPDEKELARRRQSYEGGYVKEPERGLWENIVYLDFRSLYPSIIITHNVSPDTLNREGCKEYDVAPQVGHRFCKDFPGFIPSLLGDLLEERQKIKKKMKATIDPIERKLLDYRQRAIKILANSYYGYYGYARARWYCKECAESVTAWGREYITMTIKEIEEKYGFKVIYSDTDGFFATIPGADAETVKKKAMEFLKYINAKLPGALELEYEGFYKRGFFVTKKKYAVIDEEGKITTRGLEIVRRDWSEIAKETQARVLEALLKDGDVEKAVRIVKEVTEKLSKYEVPPEKLVIHEQITRDLKDYKATGPHVAVAKRLAARGVKIRPGTVISYIVLKGSGRIGDRAIPFDEFDPTKHKYDAEYYIENQVLPAVERILRAFGYRKEDLRYQKTRQVGLSAWLKPKGT

SEQ ID NO: 2883 - protein, 774 aa, synthetic construct
MILDTDMITEDGKPVLRIFKKENGEFKIEYDRTFEPYFYALLKDDSAIEEVKKITAERHGTVVTVKRVEKVQKKFLGRPVEVWKLYFTHPQDRPAIADKIREHPAVIDIYEYDIPFAKRYLIDKGLVPMEGDEELKMLAFDIETLYHEGEEFAEGPILMISYADEEGARVITWKNVDLPYVDVVSTEREMIKRFLRVVKEKDPDVLITYNGDNFDFAYLKKRCEKLGINFALGRDGSEPKIQRMGDRFAVEVKGRIHFDLYPVIRRTINLPTYTLEAVYEAVFGQPKEKVYAEEITTAWETGENLERVARYSMEDAKVTYELGKEFLPMEAQLSRLIGQSLWDVSRSSTGNLVEWFLLRKAYERNELAPNKPDEKELARRRQSYEGGYVKEPERGLWENIVYLDFRSLYPSIIITHNVSPDTLNREGCKEYDVAPQVGHRFCKDFPGFIPSLLGDLLEERQKIKKKMKATIDPIERKLLDYRQRAIKILANSYYGYYGYARARWYCKECAESVTAWGREYITMTIKEIEEKYGFKVIYSDTDGFFATIPGADAETVKKKAMEFLKYINAKLPGALELEYEGFYKRGFFVTKKKYAVIDEEGKITTRGLEIVRRDWSEIAKETQARVLEALLKDGDVEKAVRIVKEVTEKLSKYEVPPEKLVIHEQITRDLKDYKATGPHVAVAKRLAARGVKIRPGTVISYIVLKGSGRIGDRAIPFDEFDPTKHKYDAEYYIENQVLPAVERILRAFGYRKEDLRYQKTRQVGLSAWLKPKGT

SEQ ID NO: 2884 - protein, 774 aa, synthetic construct
MILDTDMITEDGKPVLRIFKKENGEFKIEYDRTFEPYFYALLKDDSAIEEVKKITAERHGTVVTVKRVEKVQKKFLGRPVEVWKLYFTHPQDRPAIADKIREHPAVIDIYEYDIPFAKQYLIDKGLVPMEGDEELKMLAFDIETLYHEGEEFAEGPILMISYADEEGARVITWKNVDLPYVDVVSTEREMIKRFLRVVKEKDPDVLITYNGDNFDFAYLKKRCEKLGINFALGRDGSEPKIQRMGDRFAVEVKGRIHFDLYPVIRRTINLPTYTLEAVYEAVFGQPKEKVYAEEITTAWETGENLERVARYSMEDAKVTYELGKEFLPMEAQLSRLIGQSLWDVSRSSTGNLVEWFLLRKAYERNELAPNKPDEKELARRRQSYEGGYVKEPERGLWENIVYLDFRSLYPSIIITHNVSPDTLNREGCKEYDVAPQVGHRFCKDFPGFIPSLLGDLLEERQKIKKKMKATIDPIERKLLDYRQRAIKILANSYYGYYGYARARWYCKECAESVTAWGREYITMTIKEIEEKYGFKVIYSDTDGFFATIPGADAETVKKKAMEFLKYINAKLPGALELEYEGFYKRGFFVTKKKYAVIDEEGKITTRGLEIVRRDWSEIAKETQARVLEALLKDGDVEKAVRIVKEVTEKLSKYEVPPEKLVIHEQITRDLKDYKATGPHVAVAKRLAARGVKIRPGTVISYIVLKGSGRIGDRAIPFDEFDPTKHKYDAEYYIENQVLPAVERILRAFGYRKEDLRYQKTRQVGLSAWLKPKGT

SEQ ID NO: 2885 - protein, 774 aa, synthetic construct
MILDTDMITEDGKPVLRIFKKENGEFKIEYDRTFEPYFYALLKDDSAIEEVKKITAERHGTVVTVKRVEKVQKKFLGRPVEVWKLYFTHPQDRPAIFDKIREHPAVIDIYEYDIPFAKRYLIDKGLVPMEGDEELKMLAFDIETLYHEGEEFAEGPILMISYADEEGARVITWKNVDLPYVDVVSTEREMIKRFLRVVKEKDPDVLITYNGDNFDFAYLKKRCEKLGINFALGRDGSEPKIQRMGDRFAVEVKGRIHFDLYPVIRRTINLPTYTLEAVYEAVFGQPKEKVYAEEITTAWETGENLERVARYSMEDAKVTYELGKEFLPMEAQLSRLIGQSLWDVSRSSTGNLVEWFLLRKAYERNELAPNKPDEKELARRRQSYEGGYVKEPERGLWENIVYLDFRSLYPSIIITHNVSPDTLNREGCKEYDVAPQVGHRFCKDFPGFIPSLLGDLLEERQKIKKKMKATIDPIERKLLDYRQRAIKILANSYYGYYGYARARWYCKECAESVTAWGREYITMTIKEIEEKYGFKVIYSDTDGFFATIPGADAETVKKKAMEFLKYINAKLPGALELEYEGFYKRGFFVTKKKYAVIDEEGKITTRGLEIVRRDWSEIAKETQARVLEALLKDGDVEKAVRIVKEVTEKLSKYEVPPEKLVIHEQITRDLKDYKATGPHVAVAKRLAARGVKIRPGTVISYIVLKGSGRIGDRAIPFDEFDPTKHKYDAEYYIENQVLPAVERILRAFGYRKEDLRYQKTRQVGLSAWLKPKGT

SEQ ID NO: 2886 - protein, 774 aa, synthetic construct
MILDTDMITEDGKPVLRIFKKENGEFKIEYDRTFEPYFYALLKDDSAIEEVKKITAERHGTVVTVKRVEKVQKKFLGRPVEVWKLYFTHPQDRPAIHDKIREHPAVIDIYEYDIPFAKRYLIDKGLVPMEGDEELKMLAFDIETLYHEGEEFAEGPILMISYADEEGARVITWKNVDLPYVDVVSTEREMIKRFLRVVKEKDPDVLITYNGDNFDFAYLKKRCEKLGINFALGRDGSEPKIQRMGDRFAVEVKGRIHFDLYPVIRRTINLPTYTLEAVYEAVFGQPKEKVYAEEITTAWETGENLERVARYSMEDAKVTYELGKEFLPMEAQLSRLIGQSLWDVSRSSTGNLVEWFLLRKAYERNELAPNKPDEKELARRRQSYEGGYVKEPERGLWENIVYLDFRSLYPSIIITHNVSPDTLNREGCKEYDVAPQVGHRFCKDFPGFIPSLLGDLLEERQKIKKKMKATIDPIERKLLDYRQRAIKILANSYYGYYGYARARWYCKECAESVTAWGREYITMTIKEIEEKYGFKVIYSDTDGFFATIPGADAETVKKKAMEFLKYINAKLPGALELEYEGFYKRGFFVTKKKYAVIDEEGKITTRGLEIVRRDWSEIAKETQARVLEALLKDGDVEKAVRIVKEVTEKLSKYEVPPEKLVIHEQITRDLKDYKATGPHVAVAKRLAARGVKIRPGTVISYIVLKGSGRIGDRAIPFDEFDPTKHKYDAEYYIENQVLPAVERILRAFGYRKEDLRYQKTRQVGLSAWLKPKGT

SEQ ID NO: 2887 - protein, 774 aa, synthetic construct
MILDTDMITEDGKPVLRIFKKENGEFKIEYDRTFEPYFYALLKDDSAIEEVKKITAERHGTVVTVKRVEKVQKKFLGRPVEVWKLYFTHPQDRPAIWDKIREHPAVIDIYEYDIPFAKRYLIDKGLVPMEGDEELKMLAFDIETLYHEGEEFAEGPILMISYADEEGARVITWKNVDLPYVDVVSTEREMIKRFLRVVKEKDPDVLITYNGDNFDFAYLKKRCEKLGINFALGRDGSEPKIQRMGDRFAVEVKGRIHFDLYPVIRRTINLPTYTLEAVYEAVFGQPKEKVYAEEITTAWETGENLERVARYSMEDAKVTYELGKEFLPMEAQLSRLIGQSLWDVSRSSTGNLVEWFLLRKAYERNELAPNKPDEKELARRRQSYEGGYVKEPERGLWENIVYLDFRSLYPSIIITHNVSPDTLNREGCKEYDVAPQVGHRFCKDFPGFIPSLLGDLLEERQKIKKKMKATIDPIERKLLDYRQRAIKILANSYYGYYGYARARWYCKECAESVTAWGREYITMTIKEIEEKYGFKVIYSDTDGFFATIPGADAETVKKKAMEFLKYINAKLPGALELEYEGFYKRGFFVTKKKYAVIDEEGKITTRGLEIVRRDWSEIAKETQARVLEALLKDGDVEKAVRIVKEVTEKLSKYEVPPEKLVIHEQITRDLKDYKATGPHVAVAKRLAARGVKIRPGTVISYIVLKGSGRIGDRAIPFDEFDPTKHKYDAEYYIENQVLPAVERILRAFGYRKEDLRYQKTRQVGLSAWLKPKGT

SEQ ID NO: 2888 - protein, 774 aa, synthetic construct
MILDTDMITEDGKPVMRIFKKENGEFKIEYDRTFEPYFYALLKDDSAIEEVKKITAERHGTVVTVKRVEKVQKKFLGRPVEVWKLYFTHPQDVPAIRDKIREHPAVIDIYEYDIPFAKRYLIDKGLVPMEGDEELKMLAFDIETLYHEGEEFAEGPILMISYADEEGARVITWKNVDLPYVDVVSTEREMIKRFLRVVKEKDPDVLITYNGDNFDFAYLKKRCEKLGINFALGRDGSEPKIQRMGDRFAVEVKGRIHFDLYPVIRRTINLPTYTLEAVYEAVFGQPKEKVYAEEITTAWETGENLERVARYSMEDAKVTYELGKEFLPMEAQLSRLIGQSLWDVSRSSTGNLVEWFLLRKAYERNELAPNKPDEKELARRRQSYEGGYVKEPERGLWENIVYLDFRSLYPSIIITHNVSPDTLNREGCKEYDVAPQVGHRFCKDFPGFIPSLLGDLLEERQKIKKKMKATIDPIERKLLDYRQRAIKILANSYYGYYGYARARWYCKECAESVTAWGREYITMTIKEIEEKYGFKVIYSDTDGFFATIPGADAETVKKKAMEFLKYINAKLPGALELEYEGFYKRGFFVTKKKYAVIDEEGKITTRGLEIVRRDWSEIAKETQARVLEALLKDGDVEKAVRIVKEVTEKLSKYEVPPEKLVIHEQITRDLKDYKATGPHVAVAKRLAARGVKIRPGTVISYIVLKGSGRIGDRAIPFDEFDPTKHKYDAEYYIENQVLPAVERILRAFGYRKEDLRYQKTRQVGLSAWLKPKGT

SEQ ID NO: 2889 - protein, 774 aa, synthetic construct
MILDTDMITEDGKPVMRIFKKENGEFKIEYDRTFEAYFYALLKDDSAIEEVKKITAERHGTVVTVKRVEKVQKKFLGRPVEVWKLYFTHPQDVPAIRDKIREHPAVIDIYEYDIPFAKRYLIDKGLVPMEGDEELKMLAFDIETLYHEGEEFAEGPILMISYADEEGARVITWKNVDLPYVDVVSTEREMIKRFLRVVKEKDPDVLITYNGDNFDFAYLKKRCEKLGINFALGRDGSEPKIQRMGDRFAVEVKGRIHFDLYPVIRRTINLPTYTLEAVYEAVFGQPKEKVYAEEITTAWETGENLERVARYSMEDAKVTYELGKEFLPMEAQLSRLIGQSLWDVSRSSTGNLVEWFLLRKAYERNELAPNKPDEKELARRRQSYEGGYVKEPERGLWENIVYLDFRSLYPSIIITHNVSPDTLNREGCKEYDVAPQVGHRFCKDFPGFIPSLLGDLLEERQKIKKKMKATIDPIERKLLDYRQRAIKILANSYYGYYGYARARWYCKECAESVTAWGREYITMTIKEIEEKYGFKVIYSDTDGFFATIPGADAETVKKKAMEFLKYINAKLPGALELEYEGFYKRGFFVTKKKYAVIDEEGKITTRGLEIVRRDWSEIAKETQARVLEALLKDGDVEKAVRIVKEVTEKLSKYEVPPEKLVIHEQITRDLKDYKATGPHVAVAKRLAARGVKIRPGTVISYIVLKGSGRIGDRAIPFDEFDPTKHKYDAEYYIENQVLPAVERILRAFGYRKEDLRYQKTRQVGLSAWLKPKGT

SEQ ID NO: 2890 - protein, 774 aa, synthetic construct
MILDTDMITEDGKPVMRIFKKENGEFKIEYDRTFEAYFYALLKDDSAIEEVKKITAERHGTVVTVKRVEKVQKKFLGRPVEVWKLYFTHWQDIPAIRDKIREHPAVIDIYEYDIPFAKRYLIDKGLVPMEGDEELKMLAFDIETLYHEGEEFAEGPILMISYADEEGARVITWKNVDLPYVDVVSTEREMIKRFLRVVKEKDPDVLITYNGDNFDFAYLKKRCEKLGINFALGRDGSEPKIQRMGDRFAVEVKGRIHFDLYPVIRRTINLPTYTLEAVYEAVFGQPKEKVYAEEITTAWETGENLERVARYSMEDAKVTYELGKEFLPMEAQLSRLIGQSLWDVSRSSTGNLVEWFLLRKAYERNELAPNKPDEKELARRRQSYEGGYVKEPERGLWENIVYLDFRSLYPSIIITHNVSPDTLNREGCKEYDVAPQVGHRFCKDFPGFIPSLLGDLLEERQKIKKKMKATIDPIERKLLDYRQRAIKILANSYYGYYGYARARWYCKECAESVTAWGREYITMTIKEIEEKYGFKVIYSDTDGFFATIPGADAETVKKKAMEFLKYINAKLPGALELEYEGFYKRGFFVTKKKYAVIDEEGKITTRGLEIVRRDWSEIAKETQARVLEALLKDGDVEKAVRIVKEVTEKLSKYEVPPEKLVIHEQITRDLKDYKATGPHVAVAKRLAARGVKIRPGTVISYIVLKGSGRIGDRAIPFDEFDPTKHKYDAEYYIENQVLPAVERILRAFGYRKEDLRYQKTRQVGLSAWLKPKGT

SEQ ID NO: 2891 - protein, 774 aa, synthetic construct
MILDTDMITEDGKPVMRIFKKENGEFKIEYDRTFEAYFYALLKDDSAIEEVKKITAERHGTVVTVKRVEKVQKKFLGRPVEVWKLYFTHYQDIPAIRDKIREHPAVIDIYEYDIPFAKRYLIDKGLVPMEGDEELKMLAFDIETLYHEGEEFAEGPILMISYADEEGARVITWKNVDLPYVDVVSTEREMIKRFLRVVKEKDPDVLITYNGDNFDFAYLKKRCEKLGINFALGRDGSEPKIQRMGDRFAVEVKGRIHFDLYPVIRRTINLPTYTLEAVYEAVFGQPKEKVYAEEITTAWETGENLERVARYSMEDAKVTYELGKEFLPMEAQLSRLIGQSLWDVSRSSTGNLVEWFLLRKAYERNELAPNKPDEKELARRRQSYEGGYVKEPERGLWENIVYLDFRSLYPSIIITHNVSPDTLNREGCKEYDVAPQVGHRFCKDFPGFIPSLLGDLLEERQKIKKKMKATIDPIERKLLDYRQRAIKILANSYYGYYGYARARWYCKECAESVTAWGREYITMTIKEIEEKYGFKVIYSDTDGFFATIPGADAETVKKKAMEFLKYINAKLPGALELEYEGFYKRGFFVTKKKYAVIDEEGKITTRGLEIVRRDWSEIAKETQARVLEALLKDGDVEKAVRIVKEVTEKLSKYEVPPEKLVIHEQITRDLKDYKATGPHVAVAKRLAARGVKIRPGTVISYIVLKGSGRIGDRAIPFDEFDPTKHKYDAEYYIENQVLPAVERILRAFGYRKEDLRYQKTRQVGLSAWLKPKGT

SEQ ID NO: 2892 - protein, 774 aa, synthetic construct
MILDTDMITEDGKPVMRIFKKENGEFKIEYDRTFEAYFYALLKDDSAIEEVKKITAERHGTVVTVKRVEKVQKKFLGRPVEVWKLYFTHPQDVPAIHDKIREHPAVIDIYEYDIPFAKRYLIDKGLVPMEGDEELKMLAFDIETLYHEGEEFAEGPILMISYADEEGARVITWKNVDLPYVDVVSTEREMIKRFLRVVKEKDPDVLITYNGDNFDFAYLKKRCEKLGINFALGRDGSEPKIQRMGDRFAVEVKGRIHFDLYPVIRRTINLPTYTLEAVYEAVFGQPKEKVYAEEITTAWETGENLERVARYSMEDAKVTYELGKEFLPMEAQLSRLIGQSLWDVSRSSTGNLVEWFLLRKAYERNELAPNKPDEKELARRRQSYEGGYVKEPERGLWENIVYLDFRSLYPSIIITHNVSPDTLNREGCKEYDVAPQVGHRFCKDFPGFIPSLLGDLLEERQKIKKKMKATIDPIERKLLDYRQRAIKILANSYYGYYGYARARWYCKECAESVTAWGREYITMTIKEIEEKYGFKVIYSDTDGFFATIPGADAETVKKKAMEFLKYINAKLPGALELEYEGFYKRGFFVTKKKYAVIDEEGKITTRGLEIVRRDWSEIAKETQARVLEALLKDGDVEKAVRIVKEVTEKLSKYEVPPEKLVIHEQITRDLKDYKATGPHVAVAKRLAARGVKIRPGTVISYIVLKGSGRIGDRAIPFDEFDPTKHKYDAEYYIENQVLPAVERILRAFGYRKEDLRYQKTRQVGLSAWLKPKGT

SEQ ID NO: 2893 - protein, 774 aa, synthetic construct
MILDTDMITEDGKPVMRIFKKENGEFKIEYDRTFEAYFYALLKDDSAIEEVKKITAERHGTVVTVKRVEKVQKKFLGRPVEVWKLYFTHPQDIPAIRDKIREHPAVIDIYEYDIPFAKRYLIDKGLVPMEGDEELKMLAFDIETLYHEGEEFAEGPILMISYADEEGARVITWKNVDLPYVDVVSTEREMIKRFLRVVKEKDPDVLITYNGDNFDFAYLKKRCEKLGINFALGRDGSEPKIQRMGDRFAVEVKGRIHFDLYPVIRRTINLPTYTLEAVYEAVFGQPKEKVYAEEITTAWETGENLERVARYSMEDAKVTYELGKEFLPMEAQLSRLIGQSLWDVSRSSTGNLVEWFLLRKAYERNELAPNKPDEKELARRRQSYEGGYVKEPERGLWENIVYLDFRSLYPSIIITHNVSPDTLNREGCKEYDVAPQVGHRFCKDFPGFIPSLLGDLLEERQKIKKKMKATIDPIERKLLDYRQRAIKILANSYYGYYGYARARWYCKECAESVTAWGREYITMTIKEIEEKYGFKVIYSDTDGFFATIPGADAETVKKKAMEFLKYINAKLPGALELEYEGFYKRGFFVTKKKYAVIDEEGKITTRGLEIVRRDWSEIAKETQARVLEALLKDGDVEKAVRIVKEVTEKLSKYEVPPEKLVIHEQITRDLKDYKATGPHVAVAKRLAARGVKIRPGTVISYIVLKGSGRIGDRAIPFDEFDPTKHKYDAEYYIENQVLPAVERILRAFGYRKEDLRYQKTRQVGLSAWLKPKGT

SEQ ID NO: 2894 - protein, 774 aa, synthetic construct
MILDTDMITEDGKPVMRIFKKENGEFKIEYDRTFEAYFYALLKDDSAIEEVKKITAERHGTVVTVKRVEKVQKKFLGRPVEVWKLYFTHPQDIPAIADKIREHPAVIDIYEYDIPFAKRYLIDKGLVPMEGDEELKMLAFDIETLYHEGEEFAEGPILMISYADEEGARVITWKNVDLPYVDVVSTEREMIKRFLRVVKEKDPDVLITYNGDNFDFAYLKKRCEKLGINFALGRDGSEPKIQRMGDRFAVEVKGRIHFDLYPVIRRTINLPTYTLEAVYEAVFGQPKEKVYAEEITTAWETGENLERVARYSMEDAKVTYELGKEFLPMEAQLSRLIGQSLWDVSRSSTGNLVEWFLLRKAYERNELAPNKPDEKELARRRQSYEGGYVKEPERGLWENIVYLDFRSLYPSIIITHNVSPDTLNREGCKEYDVAPQVGHRFCKDFPGFIPSLLGDLLEERQKIKKKMKATIDPIERKLLDYRQRAIKILANSYYGYYGYARARWYCKECAESVTAWGREYITMTIKEIEEKYGFKVIYSDTDGFFATIPGADAETVKKKAMEFLKYINAKLPGALELEYEGFYKRGFFVTKKKYAVIDEEGKITTRGLEIVRRDWSEIAKETQARVLEALLKDGDVEKAVRIVKEVTEKLSKYEVPPEKLVIHEQITRDLKDYKATGPHVAVAKRLAARGVKIRPGTVISYIVLKGSGRIGDRAIPFDEFDPTKHKYDAEYYIENQVLPAVERILRAFGYRKEDLRYQKTRQVGLSAWLKPKGT

SEQ ID NO: 2895 - protein, 774 aa, synthetic construct
MILDTDMITEDGKPVMRIFKKENGEFKIEYDRTFEAYFYALLKDDSAIEEVKKITAERHGTVVTVKRVEKVQKKFLGRPVEVWKLYFTHPQDIPAIFDKIREHPAVIDIYEYDIPFAKRYLIDKGLVPMEGDEELKMLAFDIETLYHEGEEFAEGPILMISYADEEGARVITWKNVDLPYVDVVSTEREMIKRFLRVVKEKDPDVLITYNGDNFDFAYLKKRCEKLGINFALGRDGSEPKIQRMGDRFAVEVKGRIHFDLYPVIRRTINLPTYTLEAVYEAVFGQPKEKVYAEEITTAWETGENLERVARYSMEDAKVTYELGKEFLPMEAQLSRLIGQSLWDVSRSSTGNLVEWFLLRKAYERNELAPNKPDEKELARRRQSYEGGYVKEPERGLWENIVYLDFRSLYPSIIITHNVSPDTLNREGCKEYDVAPQVGHRFCKDFPGFIPSLLGDLLEERQKIKKKMKATIDPIERKLLDYRQRAIKILANSYYGYYGYARARWYCKECAESVTAWGREYITMTIKEIEEKYGFKVIYSDTDGFFATIPGADAETVKKKAMEFLKYINAKLPGALELEYEGFYKRGFFVTKKKYAVIDEEGKITTRGLEIVRRDWSEIAKETQARVLEALLKDGDVEKAVRIVKEVTEKLSKYEVPPEKLVIHEQITRDLKDYKATGPHVAVAKRLAARGVKIRPGTVISYIVLKGSGRIGDRAIPFDEFDPTKHKYDAEYYIENQVLPAVERILRAFGYRKEDLRYQKTRQVGLSAWLKPKGT

SEQ ID NO: 2896 - protein, 774 aa, synthetic construct
MILDTDMITEDGKPVMRIFKKENGEFKIEYDRTFEAYFYALLKDDSAIEEVKKITAERHGTVVTVKRVEKVQKKFLGRPVEVWKLYFTHPQDRPAIRDKIREHPAVIDIYEYDIPFAKRYLIDKGLVPMEGDEELKMLAFDIETLYHEGEEFAEGPILMISYADEEGARVITWKNVDLPYVDVVSTEREMIKRFLRVVKEKDPDVLITYNGDNFDFAYLKKRCEKLGINFALGRDGSEPKIQRMGDRFAVEVKGRIHFDLYPVIRRTINLPTYTLEAVYEAVFGQPKEKVYAEEITTAWETGENLERVARYSMEDAKVTYELGKEFLPMEAQLSRLIGQSLWDVSRSSTGNLVEWFLLRKAYERNELAPNKPDEKELARRRQSYEGGYVKEPERGLWENIVYLDFRSLYPSIIITHNVSPDTLNREGCKEYDVAPQVGHRFCKDFPGFIPSLLGDLLEERQKIKKKMKATIDPIERKLLDYRQRAIKILANSYYGYYGYARARWYCKECAESVTAWGREYITMTIKEIEEKYGFKVIYSDTDGFFATIPGADAETVKKKAMEFLKYINAKLPGALELEYEGFYKRGFFVTKKKYAVIDEEGKITTRGLEIVRRDWSEIAKETQARVLEALLKDGDVEKAVRIVKEVTEKLSKYEVPPEKLVIHEQITRDLKDYKATGPHVAVAKRLAARGVKIRPGTVISYIVLKGSGRIGDRAIPFDEFDPTKHKYDAEYYIENQVLPAVERILRAFGYRKEDLRYQKTRQVGLSAWLKPKGT

SEQ ID NO: 2897 - protein, 774 aa, synthetic construct
MILDTDMITEDGKPVMRIFKKENGEFKIEYDRTFEAYFYALLKDDSAIEEVKKITAERHGTVVTVKRVEKVQKKFLGRPVEVWKLYFTHPQDRPAIADKIREHPAVIDIYEYDIPFAKRYLIDKGLVPMEGDEELKMLAFDIETLYHEGEEFAEGPILMISYADEEGARVITWKNVDLPYVDVVSTEREMIKRFLRVVKEKDPDVLITYNGDNFDFAYLKKRCEKLGINFALGRDGSEPKIQRMGDRFAVEVKGRIHFDLYPVIRRTINLPTYTLEAVYEAVFGQPKEKVYAEEITTAWETGENLERVARYSMEDAKVTYELGKEFLPMEAQLSRLIGQSLWDVSRSSTGNLVEWFLLRKAYERNELAPNKPDEKELARRRQSYEGGYVKEPERGLWENIVYLDFRSLYPSIIITHNVSPDTLNREGCKEYDVAPQVGHRFCKDFPGFIPSLLGDLLEERQKIKKKMKATIDPIERKLLDYRQRAIKILANSYYGYYGYARARWYCKECAESVTAWGREYITMTIKEIEEKYGFKVIYSDTDGFFATIPGADAETVKKKAMEFLKYINAKLPGALELEYEGFYKRGFFVTKKKYAVIDEEGKITTRGLEIVRRDWSEIAKETQARVLEALLKDGDVEKAVRIVKEVTEKLSKYEVPPEKLVIHEQITRDLKDYKATGPHVAVAKRLAARGVKIRPGTVISYIVLKGSGRIGDRAIPFDEFDPTKHKYDAEYYIENQVLPAVERILRAFGYRKEDLRYQKTRQVGLSAWLKPKGT

SEQ ID NO: 2898 - protein, 774 aa, synthetic construct
MILDTDMITEDGKPVMRIFKKENGEFKIEYDRTFEHYFYALLKDDSAIEEVKKITAERHGTVVTVKRVEKVQKKFLGRPVEVWKLYFTHPQDIPAIRDKIREHPAVIDIYEYDIPFAKRYLIDKGLVPMEGDEELKMLAFDIETLYHEGEEFAEGPILMISYADEEGARVITWKNVDLPYVDVVSTEREMIKRFLRVVKEKDPDVLITYNGDNFDFAYLKKRCEKLGINFALGRDGSEPKIQRMGDRFAVEVKGRIHFDLYPVIRRTINLPTYTLEAVYEAVFGQPKEKVYAEEITTAWETGENLERVARYSMEDAKVTYELGKEFLPMEAQLSRLIGQSLWDVSRSSTGNLVEWFLLRKAYERNELAPNKPDEKELARRRQSYEGGYVKEPERGLWENIVYLDFRSLYPSIIITHNVSPDTLNREGCKEYDVAPQVGHRFCKDFPGFIPSLLGDLLEERQKIKKKMKATIDPIERKLLDYRQRAIKILANSYYGYYGYARARWYCKECAESVTAWGREYITMTIKEIEEKYGFKVIYSDTDGFFATIPGADAETVKKKAMEFLKYINAKLPGALELEYEGFYKRGFFVTKKKYAVIDEEGKITTRGLEIVRRDWSEIAKETQARVLEALLKDGDVEKAVRIVKEVTEKLSKYEVPPEKLVIHEQITRDLKDYKATGPHVAVAKRLAARGVKIRPGTVISYIVLKGSGRIGDRAIPFDEFDPTKHKYDAEYYIENQVLPAVERILRAFGYRKEDLRYQKTRQVGLSAWLKPKGT

SEQ ID NO: 2899 - protein, 774 aa, synthetic construct
MILDTDMITEDGKPVMRIFKKENGEFKIEYDRTFEHYFYALLKDDSAIEEVKKITAERHGTVVTVKRVEKVQKKFLGRPVEVWKLYFTHPQDIPAIADKIREHPAVIDIYEYDIPFAKRYLIDKGLVPMEGDEELKMLAFDIETLYHEGEEFAEGPILMISYADEEGARVITWKNVDLPYVDVVSTEREMIKRFLRVVKEKDPDVLITYNGDNFDFAYLKKRCEKLGINFALGRDGSEPKIQRMGDRFAVEVKGRIHFDLYPVIRRTINLPTYTLEAVYEAVFGQPKEKVYAEEITTAWETGENLERVARYSMEDAKVTYELGKEFLPMEAQLSRLIGQSLWDVSRSSTGNLVEWFLLRKAYERNELAPNKPDEKELARRRQSYEGGYVKEPERGLWENIVYLDFRSLYPSIIITHNVSPDTLNREGCKEYDVAPQVGHRFCKDFPGFIPSLLGDLLEERQKIKKKMKATIDPIERKLLDYRQRAIKILANSYYGYYGYARARWYCKECAESVTAWGREYITMTIKEIEEKYGFKVIYSDTDGFFATIPGADAETVKKKAMEFLKYINAKLPGALELEYEGFYKRGFFVTKKKYAVIDEEGKITTRGLEIVRRDWSEIAKETQARVLEALLKDGDVEKAVRIVKEVTEKLSKYEVPPEKLVIHEQITRDLKDYKATGPHVAVAKRLAARGVKIRPGTVISYIVLKGSGRIGDRAIPFDEFDPTKHKYDAEYYIENQVLPAVERILRAFGYRKEDLRYQKTRQVGLSAWLKPKGT

SEQ ID NO: 2900 - protein, 774 aa, synthetic construct
MILDTDMITEDGKPVMRIFKKENGEFKIEYDRTFEHYFYALLKDDSAIEEVKKITAERHGTVVTVKRVEKVQKKFLGRPVEVWKLYFTHPQDIPAIFDKIREHPAVIDIYEYDIPFAKRYLIDKGLVPMEGDEELKMLAFDIETLYHEGEEFAEGPILMISYADEEGARVITWKNVDLPYVDVVSTEREMIKRFLRVVKEKDPDVLITYNGDNFDFAYLKKRCEKLGINFALGRDGSEPKIQRMGDRFAVEVKGRIHFDLYPVIRRTINLPTYTLEAVYEAVFGQPKEKVYAEEITTAWETGENLERVARYSMEDAKVTYELGKEFLPMEAQLSRLIGQSLWDVSRSSTGNLVEWFLLRKAYERNELAPNKPDEKELARRRQSYEGGYVKEPERGLWENIVYLDFRSLYPSIIITHNVSPDTLNREGCKEYDVAPQVGHRFCKDFPGFIPSLLGDLLEERQKIKKKMKATIDPIERKLLDYRQRAIKILANSYYGYYGYARARWYCKECAESVTAWGREYITMTIKEIEEKYGFKVIYSDTDGFFATIPGADAETVKKKAMEFLKYINAKLPGALELEYEGFYKRGFFVTKKKYAVIDEEGKITTRGLEIVRRDWSEIAKETQARVLEALLKDGDVEKAVRIVKEVTEKLSKYEVPPEKLVIHEQITRDLKDYKATGPHVAVAKRLAARGVKIRPGTVISYIVLKGSGRIGDRAIPFDEFDPTKHKYDAEYYIENQVLPAVERILRAFGYRKEDLRYQKTRQVGLSAWLKPKGT

SEQ ID NO: 2901 - protein, 774 aa, synthetic construct
MILDTDMITEDGKPVMRIFKKENGEFKIEYDRTFESYFYALLKDDSAIEEVKKITAERHGTVVTVKRVEKVQKKFLGRPVEVWKLYFTHPQDVPAIADKIREHPAVIDIYEYDIPFAKRYLIDKGLVPMEGDEELKMLAFDIETLYHEGEEFAEGPILMISYADEEGARVITWKNVDLPYVDVVSTEREMIKRFLRVVKEKDPDVLITYNGDNFDFAYLKKRCEKLGINFALGRDGSEPKIQRMGDRFAVEVKGRIHFDLYPVIRRTINLPTYTLEAVYEAVFGQPKEKVYAEEITTAWETGENLERVARYSMEDAKVTYELGKEFLPMEAQLSRLIGQSLWDVSRSSTGNLVEWFLLRKAYERNELAPNKPDEKELARRRQSYEGGYVKEPERGLWENIVYLDFRSLYPSIIITHNVSPDTLNREGCKEYDVAPQVGHRFCKDFPGFIPSLLGDLLEERQKIKKKMKATIDPIERKLLDYRQRAIKILANSYYGYYGYARARWYCKECAESVTAWGREYITMTIKEIEEKYGFKVIYSDTDGFFATIPGADAETVKKKAMEFLKYINAKLPGALELEYEGFYKRGFFVTKKKYAVIDEEGKITTRGLEIVRRDWSEIAKETQARVLEALLKDGDVEKAVRIVKEVTEKLSKYEVPPEKLVIHEQITRDLKDYKATGPHVAVAKRLAARGVKIRPGTVISYIVLKGSGRIGDRAIPFDEFDPTKHKYDAEYYIENQVLPAVERILRAFGYRKEDLRYQKTRQVGLSAWLKPKGT

SEQ ID NO: 2902 - protein, 774 aa, synthetic construct
MILDTDMITEDGKPVMRIFKKENGEFKIEYDRTFESYFYALLKDDSAIEEVKKITAERHGTVVTVKRVEKVQKKFLGRPVEVWKLYFTHPQDIPAIADKIREHPAVIDIYEYDIPFAKRYLIDKGLVPMEGDEELKMLAFDIETLYHEGEEFAEGPILMISYADEEGARVITWKNVDLPYVDVVSTEREMIKRFLRVVKEKDPDVLITYNGDNFDFAYLKKRCEKLGINFALGRDGSEPKIQRMGDRFAVEVKGRIHFDLYPVIRRTINLPTYTLEAVYEAVFGQPKEKVYAEEITTAWETGENLERVARYSMEDAKVTYELGKEFLPMEAQLSRLIGQSLWDVSRSSTGNLVEWFLLRKAYERNELAPNKPDEKELARRRQSYEGGYVKEPERGLWENIVYLDFRSLYPSIIITHNVSPDTLNREGCKEYDVAPQVGHRFCKDFPGFIPSLLGDLLEERQKIKKKMKATIDPIERKLLDYRQRAIKILANSYYGYYGYARARWYCKECAESVTAWGREYITMTIKEIEEKYGFKVIYSDTDGFFATIPGADAETVKKKAMEFLKYINAKLPGALELEYEGFYKRGFFVTKKKYAVIDEEGKITTRGLEIVRRDWSEIAKETQARVLEALLKDGDVEKAVRIVKEVTEKLSKYEVPPEKLVIHEQITRDLKDYKATGPHVAVAKRLAARGVKIRPGTVISYIVLKGSGRIGDRAIPFDEFDPTKHKYDAEYYIENQVLPAVERILRAFGYRKEDLRYQKTRQVGLSAWLKPKGT

SEQ ID NO: 2903 - protein, 774 aa, synthetic construct
MILDTDMITEDGKPVMRIFKKENGEFKIEYDRTFESYFYALLKDDSAIEEVKKITAERHGTVVTVKRVEKVQKKFLGRPVEVWKLYFTHPQDIPAIFDKIREHPAVIDIYEYDIPFAKRYLIDKGLVPMEGDEELKMLAFDIETLYHEGEEFAEGPILMISYADEEGARVITWKNVDLPYVDVVSTEREMIKRFLRVVKEKDPDVLITYNGDNFDFAYLKKRCEKLGINFALGRDGSEPKIQRMGDRFAVEVKGRIHFDLYPVIRRTINLPTYTLEAVYEAVFGQPKEKVYAEEITTAWETGENLERVARYSMEDAKVTYELGKEFLPMEAQLSRLIGQSLWDVSRSSTGNLVEWFLLRKAYERNELAPNKPDEKELARRRQSYEGGYVKEPERGLWENIVYLDFRSLYPSIIITHNVSPDTLNREGCKEYDVAPQVGHRFCKDFPGFIPSLLGDLLEERQKIKKKMKATIDPIERKLLDYRQRAIKILANSYYGYYGYARARWYCKECAESVTAWGREYITMTIKEIEEKYGFKVIYSDTDGFFATIPGADAETVKKKAMEFLKYINAKLPGALELEYEGFYKRGFFVTKKKYAVIDEEGKITTRGLEIVRRDWSEIAKETQARVLEALLKDGDVEKAVRIVKEVTEKLSKYEVPPEKLVIHEQITRDLKDYKATGPHVAVAKRLAARGVKIRPGTVISYIVLKGSGRIGDRAIPFDEFDPTKHKYDAEYYIENQVLPAVERILRAFGYRKEDLRYQKTRQVGLSAWLKPKGT

SEQ ID NO: 2904 - protein, 774 aa, synthetic construct
MILDTDMITEDGKPVMRIFKKENGEFKIEYDRTFESYFYALLKDDSAIEEVKKITAERHGTVVTVKRVEKVQKKFLGRPVEVWKLYFTHPQDRPAIADKIREHPAVIDIYEYDIPFAKRYLIDKGLVPMEGDEELKMLAFDIETLYHEGEEFAEGPILMISYADEEGARVITWKNVDLPYVDVVSTEREMIKRFLRVVKEKDPDVLITYNGDNFDFAYLKKRCEKLGINFALGRDGSEPKIQRMGDRFAVEVKGRIHFDLYPVIRRTINLPTYTLEAVYEAVFGQPKEKVYAEEITTAWETGENLERVARYSMEDAKVTYELGKEFLPMEAQLSRLIGQSLWDVSRSSTGNLVEWFLLRKAYERNELAPNKPDEKELARRRQSYEGGYVKEPERGLWENIVYLDFRSLYPSIIITHNVSPDTLNREGCKEYDVAPQVGHRFCKDFPGFIPSLLGDLLEERQKIKKKMKATIDPIERKLLDYRQRAIKILANSYYGYYGYARARWYCKECAESVTAWGREYITMTIKEIEEKYGFKVIYSDTDGFFATIPGADAETVKKKAMEFLKYINAKLPGALELEYEGFYKRGFFVTKKKYAVIDEEGKITTRGLEIVRRDWSEIAKETQARVLEALLKDGDVEKAVRIVKEVTEKLSKYEVPPEKLVIHEQITRDLKDYKATGPHVAVAKRLAARGVKIRPGTVISYIVLKGSGRIGDRAIPFDEFDPTKHKYDAEYYIENQVLPAVERILRAFGYRKEDLRYQKTRQVGLSAWLKPKGT

SEQ ID NO: 2905 - protein, 774 aa, synthetic construct
MILDTDMITEDGKPVMRIFKKENGEFKIEYDRTFEWYFYALLKDDSAIEEVKKITAERHGTVVTVKRVEKVQKKFLGRPVEVWKLYFTHPQDVPAIRDKIREHPAVIDIYEYDIPFAKRYLIDKGLVPMEGDEELKMLAFDIETLYHEGEEFAEGPILMISYADEEGARVITWKNVDLPYVDVVSTEREMIKRFLRVVKEKDPDVLITYNGDNFDFAYLKKRCEKLGINFALGRDGSEPKIQRMGDRFAVEVKGRIHFDLYPVIRRTINLPTYTLEAVYEAVFGQPKEKVYAEEITTAWETGENLERVARYSMEDAKVTYELGKEFLPMEAQLSRLIGQSLWDVSRSSTGNLVEWFLLRKAYERNELAPNKPDEKELARRRQSYEGGYVKEPERGLWENIVYLDFRSLYPSIIITHNVSPDTLNREGCKEYDVAPQVGHRFCKDFPGFIPSLLGDLLEERQKIKKKMKATIDPIERKLLDYRQRAIKILANSYYGYYGYARARWYCKECAESVTAWGREYITMTIKEIEEKYGFKVIYSDTDGFFATIPGADAETVKKKAMEFLKYINAKLPGALELEYEGFYKRGFFVTKKKYAVIDEEGKITTRGLEIVRRDWSEIAKETQARVLEALLKDGDVEKAVRIVKEVTEKLSKYEVPPEKLVIHEQITRDLKDYKATGPHVAVAKRLAARGVKIRPGTVISYIVLKGSGRIGDRAIPFDEFDPTKHKYDAEYYIENQVLPAVERILRAFGYRKEDLRYQKTRQVGLSAWLKPKGT

SEQ ID NO: 2906 - protein, 774 aa, synthetic construct
MILDTDMITEDGKPVMRIFKKENGEFKIEYDRTFEWYFYALLKDDSAIEEVKKITAERHGTVVTVKRVEKVQKKFLGRPVEVWKLYFTHFQDVPAIRDKIREHPAVIDIYEYDIPFAKRYLIDKGLVPMEGDEELKMLAFDIETLYHEGEEFAEGPILMISYADEEGARVITWKNVDLPYVDVVSTEREMIKRFLRVVKEKDPDVLITYNGDNFDFAYLKKRCEKLGINFALGRDGSEPKIQRMGDRFAVEVKGRIHFDLYPVIRRTINLPTYTLEAVYEAVFGQPKEKVYAEEITTAWETGENLERVARYSMEDAKVTYELGKEFLPMEAQLSRLIGQSLWDVSRSSTGNLVEWFLLRKAYERNELAPNKPDEKELARRRQSYEGGYVKEPERGLWENIVYLDFRSLYPSIIITHNVSPDTLNREGCKEYDVAPQVGHRFCKDFPGFIPSLLGDLLEERQKIKKKMKATIDPIERKLLDYRQRAIKILANSYYGYYGYARARWYCKECAESVTAWGREYITMTIKEIEEKYGFKVIYSDTDGFFATIPGADAETVKKKAMEFLKYINAKLPGALELEYEGFYKRGFFVTKKKYAVIDEEGKITTRGLEIVRRDWSEIAKETQARVLEALLKDGDVEKAVRIVKEVTEKLSKYEVPPEKLVIHEQITRDLKDYKATGPHVAVAKRLAARGVKIRPGTVISYIVLKGSGRIGDRAIPFDEFDPTKHKYDAEYYIENQVLPAVERILRAFGYRKEDLRYQKTRQVGLSAWLKPKGT

SEQ ID NO: 2907 - protein, 774 aa, synthetic construct
MILDTDMITEDGKPVMRIFKKENGEFKIEYDRTFEWYFYALLKDDSAIEEVKKITAERHGTVVTVKRVEKVQKKFLGRPVEVWKLYFTHFQDIPAIRDKIREHPAVIDIYEYDIPFAKRYLIDKGLVPMEGDEELKMLAFDIETLYHEGEEFAEGPILMISYADEEGARVITWKNVDLPYVDVVSTEREMIKRFLRVVKEKDPDVLITYNGDNFDFAYLKKRCEKLGINFALGRDGSEPKIQRMGDRFAVEVKGRIHFDLYPVIRRTINLPTYTLEAVYEAVFGQPKEKVYAEEITTAWETGENLERVARYSMEDAKVTYELGKEFLPMEAQLSRLIGQSLWDVSRSSTGNLVEWFLLRKAYERNELAPNKPDEKELARRRQSYEGGYVKEPERGLWENIVYLDFRSLYPSIIITHNVSPDTLNREGCKEYDVAPQVGHRFCKDFPGFIPSLLGDLLEERQKIKKKMKATIDPIERKLLDYRQRAIKILANSYYGYYGYARARWYCKECAESVTAWGREYITMTIKEIEEKYGFKVIYSDTDGFFATIPGADAETVKKKAMEFLKYINAKLPGALELEYEGFYKRGFFVTKKKYAVIDEEGKITTRGLEIVRRDWSEIAKETQARVLEALLKDGDVEKAVRIVKEVTEKLSKYEVPPEKLVIHEQITRDLKDYKATGPHVAVAKRLAARGVKIRPGTVISYIVLKGSGRIGDRAIPFDEFDPTKHKYDAEYYIENQVLPAVERILRAFGYRKEDLRYQKTRQVGLSAWLKPKGT

SEQ ID NO: 2908 - protein, 774 aa, synthetic construct
MILDTDMITEDGKPVMRIFKKENGEFKIEYDRTFEWYFYALLKDDSAIEEVKKITAERHGTVVTVKRVEKVQKKFLGRPVEVWKLYFTHIQDIPAIRDKIREHPAVIDIYEYDIPFAKRYLIDKGLVPMEGDEELKMLAFDIETLYHEGEEFAEGPILMISYADEEGARVITWKNVDLPYVDVVSTEREMIKRFLRVVKEKDPDVLITYNGDNFDFAYLKKRCEKLGINFALGRDGSEPKIQRMGDRFAVEVKGRIHFDLYPVIRRTINLPTYTLEAVYEAVFGQPKEKVYAEEITTAWETGENLERVARYSMEDAKVTYELGKEFLPMEAQLSRLIGQSLWDVSRSSTGNLVEWFLLRKAYERNELAPNKPDEKELARRRQSYEGGYVKEPERGLWENIVYLDFRSLYPSIIITHNVSPDTLNREGCKEYDVAPQVGHRFCKDFPGFIPSLLGDLLEERQKIKKKMKATIDPIERKLLDYRQRAIKILANSYYGYYGYARARWYCKECAESVTAWGREYITMTIKEIEEKYGFKVIYSDTDGFFATIPGADAETVKKKAMEFLKYINAKLPGALELEYEGFYKRGFFVTKKKYAVIDEEGKITTRGLEIVRRDWSEIAKETQARVLEALLKDGDVEKAVRIVKEVTEKLSKYEVPPEKLVIHEQITRDLKDYKATGPHVAVAKRLAARGVKIRPGTVISYIVLKGSGRIGDRAIPFDEFDPTKHKYDAEYYIENQVLPAVERILRAFGYRKEDLRYQKTRQVGLSAWLKPKGT

SEQ ID NO: 2909 - protein, 774 aa, synthetic construct
MILDTDMITEDGKPVMRIFKKENGEFKIEYDRTFEWYFYALLKDDSAIEEVKKITAERHGTVVTVKRVEKVQKKFLGRPVEVWKLYFTHWQDVPAIADKIREHPAVIDIYEYDIPFAKRYLIDKGLVPMEGDEELKMLAFDIETLYHEGEEFAEGPILMISYADEEGARVITWKNVDLPYVDVVSTEREMIKRFLRVVKEKDPDVLITYNGDNFDFAYLKKRCEKLGINFALGRDGSEPKIQRMGDRFAVEVKGRIHFDLYPVIRRTINLPTYTLEAVYEAVFGQPKEKVYAEEITTAWETGENLERVARYSMEDAKVTYELGKEFLPMEAQLSRLIGQSLWDVSRSSTGNLVEWFLLRKAYERNELAPNKPDEKELARRRQSYEGGYVKEPERGLWENIVYLDFRSLYPSIIITHNVSPDTLNREGCKEYDVAPQVGHRFCKDFPGFIPSLLGDLLEERQKIKKKMKATIDPIERKLLDYRQRAIKILANSYYGYYGYARARWYCKECAESVTAWGREYITMTIKEIEEKYGFKVIYSDTDGFFATIPGADAETVKKKAMEFLKYINAKLPGALELEYEGFYKRGFFVTKKKYAVIDEEGKITTRGLEIVRRDWSEIAKETQARVLEALLKDGDVEKAVRIVKEVTEKLSKYEVPPEKLVIHEQITRDLKDYKATGPHVAVAKRLAARGVKIRPGTVISYIVLKGSGRIGDRAIPFDEFDPTKHKYDAEYYIENQVLPAVERILRAFGYRKEDLRYQKTRQVGLSAWLKPKGT

SEQ ID NO: 2910 - protein, 774 aa, synthetic construct
MILDTDMITEDGKPVMRIFKKENGEFKIEYDRTFEWYFYALLKDDSAIEEVKKITAERHGTVVTVKRVEKVQKKFLGRPVEVWKLYFTHWQDIPAIRDKIREHPAVIDIYEYDIPFAKRYLIDKGLVPMEGDEELKMLAFDIETLYHEGEEFAEGPILMISYADEEGARVITWKNVDLPYVDVVSTEREMIKRFLRVVKEKDPDVLITYNGDNFDFAYLKKRCEKLGINFALGRDGSEPKIQRMGDRFAVEVKGRIHFDLYPVIRRTINLPTYTLEAVYEAVFGQPKEKVYAEEITTAWETGENLERVARYSMEDAKVTYELGKEFLPMEAQLSRLIGQSLWDVSRSSTGNLVEWFLLRKAYERNELAPNKPDEKELARRRQSYEGGYVKEPERGLWENIVYLDFRSLYPSIIITHNVSPDTLNREGCKEYDVAPQVGHRFCKDFPGFIPSLLGDLLEERQKIKKKMKATIDPIERKLLDYRQRAIKILANSYYGYYGYARARWYCKECAESVTAWGREYITMTIKEIEEKYGFKVIYSDTDGFFATIPGADAETVKKKAMEFLKYINAKLPGALELEYEGFYKRGFFVTKKKYAVIDEEGKITTRGLEIVRRDWSEIAKETQARVLEALLKDGDVEKAVRIVKEVTEKLSKYEVPPEKLVIHEQITRDLKDYKATGPHVAVAKRLAARGVKIRPGTVISYIVLKGSGRIGDRAIPFDEFDPTKHKYDAEYYIENQVLPAVERILRAFGYRKEDLRYQKTRQVGLSAWLKPKGT

SEQ ID NO: 2911 - protein, 774 aa, synthetic construct
MILDTDMITEDGKPVMRIFKKENGEFKIEYDRTFEWYFYALLKDDSAIEEVKKITAERHGTVVTVKRVEKVQKKFLGRPVEVWKLYFTHWQDIPAIADKIREHPAVIDIYEYDIPFAKRYLIDKGLVPMEGDEELKMLAFDIETLYHEGEEFAEGPILMISYADEEGARVITWKNVDLPYVDVVSTEREMIKRFLRVVKEKDPDVLITYNGDNFDFAYLKKRCEKLGINFALGRDGSEPKIQRMGDRFAVEVKGRIHFDLYPVIRRTINLPTYTLEAVYEAVFGQPKEKVYAEEITTAWETGENLERVARYSMEDAKVTYELGKEFLPMEAQLSRLIGQSLWDVSRSSTGNLVEWFLLRKAYERNELAPNKPDEKELARRRQSYEGGYVKEPERGLWENIVYLDFRSLYPSIIITHNVSPDTLNREGCKEYDVAPQVGHRFCKDFPGFIPSLLGDLLEERQKIKKKMKATIDPIERKLLDYRQRAIKILANSYYGYYGYARARWYCKECAESVTAWGREYITMTIKEIEEKYGFKVIYSDTDGFFATIPGADAETVKKKAMEFLKYINAKLPGALELEYEGFYKRGFFVTKKKYAVIDEEGKITTRGLEIVRRDWSEIAKETQARVLEALLKDGDVEKAVRIVKEVTEKLSKYEVPPEKLVIHEQITRDLKDYKATGPHVAVAKRLAARGVKIRPGTVISYIVLKGSGRIGDRAIPFDEFDPTKHKYDAEYYIENQVLPAVERILRAFGYRKEDLRYQKTRQVGLSAWLKPKGT

SEQ ID NO: 2912 - protein, 774 aa, synthetic construct
MILDTDMITEDGKPVMRIFKKENGEFKIEYDRTFEWYFYALLKDDSAIEEVKKITAERHGTVVTVKRVEKVQKKFLGRPVEVWKLYFTHWQDIPAIFDKIREHPAVIDIYEYDIPFAKRYLIDKGLVPMEGDEELKMLAFDIETLYHEGEEFAEGPILMISYADEEGARVITWKNVDLPYVDVVSTEREMIKRFLRVVKEKDPDVLITYNGDNFDFAYLKKRCEKLGINFALGRDGSEPKIQRMGDRFAVEVKGRIHFDLYPVIRRTINLPTYTLEAVYEAVFGQPKEKVYAEEITTAWETGENLERVARYSMEDAKVTYELGKEFLPMEAQLSRLIGQSLWDVSRSSTGNLVEWFLLRKAYERNELAPNKPDEKELARRRQSYEGGYVKEPERGLWENIVYLDFRSLYPSIIITHNVSPDTLNREGCKEYDVAPQVGHRFCKDFPGFIPSLLGDLLEERQKIKKKMKATIDPIERKLLDYRQRAIKILANSYYGYYGYARARWYCKECAESVTAWGREYITMTIKEIEEKYGFKVIYSDTDGFFATIPGADAETVKKKAMEFLKYINAKLPGALELEYEGFYKRGFFVTKKKYAVIDEEGKITTRGLEIVRRDWSEIAKETQARVLEALLKDGDVEKAVRIVKEVTEKLSKYEVPPEKLVIHEQITRDLKDYKATGPHVAVAKRLAARGVKIRPGTVISYIVLKGSGRIGDRAIPFDEFDPTKHKYDAEYYIENQVLPAVERILRAFGYRKEDLRYQKTRQVGLSAWLKPKGT

SEQ ID NO: 2913 - protein, 774 aa, synthetic construct
MILDTDMITEDGKPVMRIFKKENGEFKIEYDRTFEWYFYALLKDDSAIEEVKKITAERHGTVVTVKRVEKVQKKFLGRPVEVWKLYFTHYQDVPAIRDKIREHPAVIDIYEYDIPFAKRYLIDKGLVPMEGDEELKMLAFDIETLYHEGEEFAEGPILMISYADEEGARVITWKNVDLPYVDVVSTEREMIKRFLRVVKEKDPDVLITYNGDNFDFAYLKKRCEKLGINFALGRDGSEPKIQRMGDRFAVEVKGRIHFDLYPVIRRTINLPTYTLEAVYEAVFGQPKEKVYAEEITTAWETGENLERVARYSMEDAKVTYELGKEFLPMEAQLSRLIGQSLWDVSRSSTGNLVEWFLLRKAYERNELAPNKPDEKELARRRQSYEGGYVKEPERGLWENIVYLDFRSLYPSIIITHNVSPDTLNREGCKEYDVAPQVGHRFCKDFPGFIPSLLGDLLEERQKIKKKMKATIDPIERKLLDYRQRAIKILANSYYGYYGYARARWYCKECAESVTAWGREYITMTIKEIEEKYGFKVIYSDTDGFFATIPGADAETVKKKAMEFLKYINAKLPGALELEYEGFYKRGFFVTKKKYAVIDEEGKITTRGLEIVRRDWSEIAKETQARVLEALLKDGDVEKAVRIVKEVTEKLSKYEVPPEKLVIHEQITRDLKDYKATGPHVAVAKRLAARGVKIRPGTVISYIVLKGSGRIGDRAIPFDEFDPTKHKYDAEYYIENQVLPAVERILRAFGYRKEDLRYQKTRQVGLSAWLKPKGT

SEQ ID NO: 2914 - protein, 774 aa, synthetic construct
MILDTDMITEDGKPVMRIFKKENGEFKIEYDRTFEWYFYALLKDDSAIEEVKKITAERHGTVVTVKRVEKVQKKFLGRPVEVWKLYFTHYQDVPAIADKIREHPAVIDIYEYDIPFAKRYLIDKGLVPMEGDEELKMLAFDIETLYHEGEEFAEGPILMISYADEEGARVITWKNVDLPYVDVVSTEREMIKRFLRVVKEKDPDVLITYNGDNFDFAYLKKRCEKLGINFALGRDGSEPKIQRMGDRFAVEVKGRIHFDLYPVIRRTINLPTYTLEAVYEAVFGQPKEKVYAEEITTAWETGENLERVARYSMEDAKVTYELGKEFLPMEAQLSRLIGQSLWDVSRSSTGNLVEWFLLRKAYERNELAPNKPDEKELARRRQSYEGGYVKEPERGLWENIVYLDFRSLYPSIIITHNVSPDTLNREGCKEYDVAPQVGHRFCKDFPGFIPSLLGDLLEERQKIKKKMKATIDPIERKLLDYRQRAIKILANSYYGYYGYARARWYCKECAESVTAWGREYITMTIKEIEEKYGFKVIYSDTDGFFATIPGADAETVKKKAMEFLKYINAKLPGALELEYEGFYKRGFFVTKKKYAVIDEEGKITTRGLEIVRRDWSEIAKETQARVLEALLKDGDVEKAVRIVKEVTEKLSKYEVPPEKLVIHEQITRDLKDYKATGPHVAVAKRLAARGVKIRPGTVISYIVLKGSGRIGDRAIPFDEFDPTKHKYDAEYYIENQVLPAVERILRAFGYRKEDLRYQKTRQVGLSAWLKPKGT

SEQ ID NO: 2915 - protein, 774 aa, synthetic construct
MILDTDMITEDGKPVMRIFKKENGEFKIEYDRTFEWYFYALLKDDSAIEEVKKITAERHGTVVTVKRVEKVQKKFLGRPVEVWKLYFTHYQDIPAIRDKIREHPAVIDIYEYDIPFAKRYLIDKGLVPMEGDEELKMLAFDIETLYHEGEEFAEGPILMISYADEEGARVITWKNVDLPYVDVVSTEREMIKRFLRVVKEKDPDVLITYNGDNFDFAYLKKRCEKLGINFALGRDGSEPKIQRMGDRFAVEVKGRIHFDLYPVIRRTINLPTYTLEAVYEAVFGQPKEKVYAEEITTAWETGENLERVARYSMEDAKVTYELGKEFLPMEAQLSRLIGQSLWDVSRSSTGNLVEWFLLRKAYERNELAPNKPDEKELARRRQSYEGGYVKEPERGLWENIVYLDFRSLYPSIIITHNVSPDTLNREGCKEYDVAPQVGHRFCKDFPGFIPSLLGDLLEERQKIKKKMKATIDPIERKLLDYRQRAIKILANSYYGYYGYARARWYCKECAESVTAWGREYITMTIKEIEEKYGFKVIYSDTDGFFATIPGADAETVKKKAMEFLKYINAKLPGALELEYEGFYKRGFFVTKKKYAVIDEEGKITTRGLEIVRRDWSEIAKETQARVLEALLKDGDVEKAVRIVKEVTEKLSKYEVPPEKLVIHEQITRDLKDYKATGPHVAVAKRLAARGVKIRPGTVISYIVLKGSGRIGDRAIPFDEFDPTKHKYDAEYYIENQVLPAVERILRAFGYRKEDLRYQKTRQVGLSAWLKPKGT

SEQ ID NO: 2916 - protein, 774 aa, synthetic construct
MILDTDMITEDGKPVMRIFKKENGEFKIEYDRTFEWYFYALLKDDSAIEEVKKITAERHGTVVTVKRVEKVQKKFLGRPVEVWKLYFTHYQDIPAIADKIREHPAVIDIYEYDIPFAKRYLIDKGLVPMEGDEELKMLAFDIETLYHEGEEFAEGPILMISYADEEGARVITWKNVDLPYVDVVSTEREMIKRFLRVVKEKDPDVLITYNGDNFDFAYLKKRCEKLGINFALGRDGSEPKIQRMGDRFAVEVKGRIHFDLYPVIRRTINLPTYTLEAVYEAVFGQPKEKVYAEEITTAWETGENLERVARYSMEDAKVTYELGKEFLPMEAQLSRLIGQSLWDVSRSSTGNLVEWFLLRKAYERNELAPNKPDEKELARRRQSYEGGYVKEPERGLWENIVYLDFRSLYPSIIITHNVSPDTLNREGCKEYDVAPQVGHRFCKDFPGFIPSLLGDLLEERQKIKKKMKATIDPIERKLLDYRQRAIKILANSYYGYYGYARARWYCKECAESVTAWGREYITMTIKEIEEKYGFKVIYSDTDGFFATIPGADAETVKKKAMEFLKYINAKLPGALELEYEGFYKRGFFVTKKKYAVIDEEGKITTRGLEIVRRDWSEIAKETQARVLEALLKDGDVEKAVRIVKEVTEKLSKYEVPPEKLVIHEQITRDLKDYKATGPHVAVAKRLAARGVKIRPGTVISYIVLKGSGRIGDRAIPFDEFDPTKHKYDAEYYIENQVLPAVERILRAFGYRKEDLRYQKTRQVGLSAWLKPKGT

SEQ ID NO: 2917 - protein, 774 aa, synthetic construct
MILDTDMITEDGKPVMRIFKKENGEFKIEYDRTFEWYFYALLKDDSAIEEVKKITAERHGTVVTVKRVEKVQKKFLGRPVEVWKLYFTHYQDIPAIHDKIREHPAVIDIYEYDIPFAKRYLIDKGLVPMEGDEELKMLAFDIETLYHEGEEFAEGPILMISYADEEGARVITWKNVDLPYVDVVSTEREMIKRFLRVVKEKDPDVLITYNGDNFDFAYLKKRCEKLGINFALGRDGSEPKIQRMGDRFAVEVKGRIHFDLYPVIRRTINLPTYTLEAVYEAVFGQPKEKVYAEEITTAWETGENLERVARYSMEDAKVTYELGKEFLPMEAQLSRLIGQSLWDVSRSSTGNLVEWFLLRKAYERNELAPNKPDEKELARRRQSYEGGYVKEPERGLWENIVYLDFRSLYPSIIITHNVSPDTLNREGCKEYDVAPQVGHRFCKDFPGFIPSLLGDLLEERQKIKKKMKATIDPIERKLLDYRQRAIKILANSYYGYYGYARARWYCKECAESVTAWGREYITMTIKEIEEKYGFKVIYSDTDGFFATIPGADAETVKKKAMEFLKYINAKLPGALELEYEGFYKRGFFVTKKKYAVIDEEGKITTRGLEIVRRDWSEIAKETQARVLEALLKDGDVEKAVRIVKEVTEKLSKYEVPPEKLVIHEQITRDLKDYKATGPHVAVAKRLAARGVKIRPGTVISYIVLKGSGRIGDRAIPFDEFDPTKHKYDAEYYIENQVLPAVERILRAFGYRKEDLRYQKTRQVGLSAWLKPKGT

SEQ ID NO: 2918 - protein, 774 aa, synthetic construct
MILDTDMITEDGKPVMRIFKKENGEFKIEYDRTFEWYFYALLKDDSAIEEVKKITAERHGTVVTVKRVEKVQKKFLGRPVEVWKLYFTHPQDIPAIRDKIREHPAVIDIYEYDIPFAKRYLIDKGLVPMEGDEELKMLAFDIETLYHEGEEFAEGPILMISYADEEGARVITWKNVDLPYVDVVSTEREMIKRFLRVVKEKDPDVLITYNGDNFDFAYLKKRCEKLGINFALGRDGSEPKIQRMGDRFAVEVKGRIHFDLYPVIRRTINLPTYTLEAVYEAVFGQPKEKVYAEEITTAWETGENLERVARYSMEDAKVTYELGKEFLPMEAQLSRLIGQSLWDVSRSSTGNLVEWFLLRKAYERNELAPNKPDEKELARRRQSYEGGYVKEPERGLWENIVYLDFRSLYPSIIITHNVSPDTLNREGCKEYDVAPQVGHRFCKDFPGFIPSLLGDLLEERQKIKKKMKATIDPIERKLLDYRQRAIKILANSYYGYYGYARARWYCKECAESVTAWGREYITMTIKEIEEKYGFKVIYSDTDGFFATIPGADAETVKKKAMEFLKYINAKLPGALELEYEGFYKRGFFVTKKKYAVIDEEGKITTRGLEIVRRDWSEIAKETQARVLEALLKDGDVEKAVRIVKEVTEKLSKYEVPPEKLVIHEQITRDLKDYKATGPHVAVAKRLAARGVKIRPGTVISYIVLKGSGRIGDRAIPFDEFDPTKHKYDAEYYIENQVLPAVERILRAFGYRKEDLRYQKTRQVGLSAWLKPKGT

SEQ ID NO: 2919 - protein, 774 aa, synthetic construct
MILDTDMITEDGKPVMRIFKKENGEFKIEYDRTFEWYFYALLKDDSAIEEVKKITAERHGTVVTVKRVEKVQKKFLGRPVEVWKLYFTHPQDIPAIADKIREHPAVIDIYEYDIPFAKRYLIDKGLVPMEGDEELKMLAFDIETLYHEGEEFAEGPILMISYADEEGARVITWKNVDLPYVDVVSTEREMIKRFLRVVKEKDPDVLITYNGDNFDFAYLKKRCEKLGINFALGRDGSEPKIQRMGDRFAVEVKGRIHFDLYPVIRRTINLPTYTLEAVYEAVFGQPKEKVYAEEITTAWETGENLERVARYSMEDAKVTYELGKEFLPMEAQLSRLIGQSLWDVSRSSTGNLVEWFLLRKAYERNELAPNKPDEKELARRRQSYEGGYVKEPERGLWENIVYLDFRSLYPSIIITHNVSPDTLNREGCKEYDVAPQVGHRFCKDFPGFIPSLLGDLLEERQKIKKKMKATIDPIERKLLDYRQRAIKILANSYYGYYGYARARWYCKECAESVTAWGREYITMTIKEIEEKYGFKVIYSDTDGFFATIPGADAETVKKKAMEFLKYINAKLPGALELEYEGFYKRGFFVTKKKYAVIDEEGKITTRGLEIVRRDWSEIAKETQARVLEALLKDGDVEKAVRIVKEVTEKLSKYEVPPEKLVIHEQITRDLKDYKATGPHVAVAKRLAARGVKIRPGTVISYIVLKGSGRIGDRAIPFDEFDPTKHKYDAEYYIENQVLPAVERILRAFGYRKEDLRYQKTRQVGLSAWLKPKGT

SEQ ID NO: 2920 - protein, 774 aa, synthetic construct
MILDTDMITEDGKPVMRIFKKENGEFKIEYDRTFEWYFYALLKDDSAIEEVKKITAERHGTVVTVKRVEKVQKKFLGRPVEVWKLYFTHPQDIPAIHDKIREHPAVIDIYEYDIPFAKRYLIDKGLVPMEGDEELKMLAFDIETLYHEGEEFAEGPILMISYADEEGARVITWKNVDLPYVDVVSTEREMIKRFLRVVKEKDPDVLITYNGDNFDFAYLKKRCEKLGINFALGRDGSEPKIQRMGDRFAVEVKGRIHFDLYPVIRRTINLPTYTLEAVYEAVFGQPKEKVYAEEITTAWETGENLERVARYSMEDAKVTYELGKEFLPMEAQLSRLIGQSLWDVSRSSTGNLVEWFLLRKAYERNELAPNKPDEKELARRRQSYEGGYVKEPERGLWENIVYLDFRSLYPSIIITHNVSPDTLNREGCKEYDVAPQVGHRFCKDFPGFIPSLLGDLLEERQKIKKKMKATIDPIERKLLDYRQRAIKILANSYYGYYGYARARWYCKECAESVTAWGREYITMTIKEIEEKYGFKVIYSDTDGFFATIPGADAETVKKKAMEFLKYINAKLPGALELEYEGFYKRGFFVTKKKYAVIDEEGKITTRGLEIVRRDWSEIAKETQARVLEALLKDGDVEKAVRIVKEVTEKLSKYEVPPEKLVIHEQITRDLKDYKATGPHVAVAKRLAARGVKIRPGTVISYIVLKGSGRIGDRAIPFDEFDPTKHKYDAEYYIENQVLPAVERILRAFGYRKEDLRYQKTRQVGLSAWLKPKGT

SEQ ID NO: 2921 - protein, 774 aa, synthetic construct
MILDTDMITEDGKPVMRIFKKENGEFKIEYDRTFEWYFYALLKDDSAIEEVKKITAERHGTVVTVKRVEKVQKKFLGRPVEVWKLYFTHPQDIPAIWDKIREHPAVIDIYEYDIPFAKRYLIDKGLVPMEGDEELKMLAFDIETLYHEGEEFAEGPILMISYADEEGARVITWKNVDLPYVDVVSTEREMIKRFLRVVKEKDPDVLITYNGDNFDFAYLKKRCEKLGINFALGRDGSEPKIQRMGDRFAVEVKGRIHFDLYPVIRRTINLPTYTLEAVYEAVFGQPKEKVYAEEITTAWETGENLERVARYSMEDAKVTYELGKEFLPMEAQLSRLIGQSLWDVSRSSTGNLVEWFLLRKAYERNELAPNKPDEKELARRRQSYEGGYVKEPERGLWENIVYLDFRSLYPSIIITHNVSPDTLNREGCKEYDVAPQVGHRFCKDFPGFIPSLLGDLLEERQKIKKKMKATIDPIERKLLDYRQRAIKILANSYYGYYGYARARWYCKECAESVTAWGREYITMTIKEIEEKYGFKVIYSDTDGFFATIPGADAETVKKKAMEFLKYINAKLPGALELEYEGFYKRGFFVTKKKYAVIDEEGKITTRGLEIVRRDWSEIAKETQARVLEALLKDGDVEKAVRIVKEVTEKLSKYEVPPEKLVIHEQITRDLKDYKATGPHVAVAKRLAARGVKIRPGTVISYIVLKGSGRIGDRAIPFDEFDPTKHKYDAEYYIENQVLPAVERILRAFGYRKEDLRYQKTRQVGLSAWLKPKGT

SEQ ID NO: 2922 - protein, 774 aa, synthetic construct
MILDTDMITEDGKPVMRIFKKENGEFKIEYDRTFEWYFYALLKDDSAIEEVKKITAERHGTVVTVKRVEKVQKKFLGRPVEVWKLYFTHPQDRPAIADKIREHPAVIDIYEYDIPFAKRYLIDKGLVPMEGDEELKMLAFDIETLYHEGEEFAEGPILMISYADEEGARVITWKNVDLPYVDVVSTEREMIKRFLRVVKEKDPDVLITYNGDNFDFAYLKKRCEKLGINFALGRDGSEPKIQRMGDRFAVEVKGRIHFDLYPVIRRTINLPTYTLEAVYEAVFGQPKEKVYAEEITTAWETGENLERVARYSMEDAKVTYELGKEFLPMEAQLSRLIGQSLWDVSRSSTGNLVEWFLLRKAYERNELAPNKPDEKELARRRQSYEGGYVKEPERGLWENIVYLDFRSLYPSIIITHNVSPDTLNREGCKEYDVAPQVGHRFCKDFPGFIPSLLGDLLEERQKIKKKMKATIDPIERKLLDYRQRAIKILANSYYGYYGYARARWYCKECAESVTAWGREYITMTIKEIEEKYGFKVIYSDTDGFFATIPGADAETVKKKAMEFLKYINAKLPGALELEYEGFYKRGFFVTKKKYAVIDEEGKITTRGLEIVRRDWSEIAKETQARVLEALLKDGDVEKAVRIVKEVTEKLSKYEVPPEKLVIHEQITRDLKDYKATGPHVAVAKRLAARGVKIRPGTVISYIVLKGSGRIGDRAIPFDEFDPTKHKYDAEYYIENQVLPAVERILRAFGYRKEDLRYQKTRQVGLSAWLKPKGT

SEQ ID NO: 2923 - protein, 774 aa, synthetic construct
MILDTDMITEDGKPVMRIFKKENGEFKIEYDRTFEPYFYALLKDDSAIEEVKKITAERHGTVVTVKRVEKVQKKFLGRPVEVWKLYFTHFQDVPAIRDKIREHPAVIDIYEYDIPFAKRYLIDKGLVPMEGDEELKMLAFDIETLYHEGEEFAEGPILMISYADEEGARVITWKNVDLPYVDVVSTEREMIKRFLRVVKEKDPDVLITYNGDNFDFAYLKKRCEKLGINFALGRDGSEPKIQRMGDRFAVEVKGRIHFDLYPVIRRTINLPTYTLEAVYEAVFGQPKEKVYAEEITTAWETGENLERVARYSMEDAKVTYELGKEFLPMEAQLSRLIGQSLWDVSRSSTGNLVEWFLLRKAYERNELAPNKPDEKELARRRQSYEGGYVKEPERGLWENIVYLDFRSLYPSIIITHNVSPDTLNREGCKEYDVAPQVGHRFCKDFPGFIPSLLGDLLEERQKIKKKMKATIDPIERKLLDYRQRAIKILANSYYGYYGYARARWYCKECAESVTAWGREYITMTIKEIEEKYGFKVIYSDTDGFFATIPGADAETVKKKAMEFLKYINAKLPGALELEYEGFYKRGFFVTKKKYAVIDEEGKITTRGLEIVRRDWSEIAKETQARVLEALLKDGDVEKAVRIVKEVTEKLSKYEVPPEKLVIHEQITRDLKDYKATGPHVAVAKRLAARGVKIRPGTVISYIVLKGSGRIGDRAIPFDEFDPTKHKYDAEYYIENQVLPAVERILRAFGYRKEDLRYQKTRQVGLSAWLKPKGT

SEQ ID NO: 2924 - protein, 774 aa, synthetic construct
MILDTDMITEDGKPVMRIFKKENGEFKIEYDRTFEPYFYALLKDDSAIEEVKKITAERHGTVVTVKRVEKVQKKFLGRPVEVWKLYFTHFQDVPAIADKIREHPAVIDIYEYDIPFAKRYLIDKGLVPMEGDEELKMLAFDIETLYHEGEEFAEGPILMISYADEEGARVITWKNVDLPYVDVVSTEREMIKRFLRVVKEKDPDVLITYNGDNFDFAYLKKRCEKLGINFALGRDGSEPKIQRMGDRFAVEVKGRIHFDLYPVIRRTINLPTYTLEAVYEAVFGQPKEKVYAEEITTAWETGENLERVARYSMEDAKVTYELGKEFLPMEAQLSRLIGQSLWDVSRSSTGNLVEWFLLRKAYERNELAPNKPDEKELARRRQSYEGGYVKEPERGLWENIVYLDFRSLYPSIIITHNVSPDTLNREGCKEYDVAPQVGHRFCKDFPGFIPSLLGDLLEERQKIKKKMKATIDPIERKLLDYRQRAIKILANSYYGYYGYARARWYCKECAESVTAWGREYITMTIKEIEEKYGFKVIYSDTDGFFATIPGADAETVKKKAMEFLKYINAKLPGALELEYEGFYKRGFFVTKKKYAVIDEEGKITTRGLEIVRRDWSEIAKETQARVLEALLKDGDVEKAVRIVKEVTEKLSKYEVPPEKLVIHEQITRDLKDYKATGPHVAVAKRLAARGVKIRPGTVISYIVLKGSGRIGDRAIPFDEFDPTKHKYDAEYYIENQVLPAVERILRAFGYRKEDLRYQKTRQVGLSAWLKPKGT

SEQ ID NO: 2925 - protein, 774 aa, synthetic construct
MILDTDMITEDGKPVMRIFKKENGEFKIEYDRTFEPYFYALLKDDSAIEEVKKITAERHGTVVTVKRVEKVQKKFLGRPVEVWKLYFTHFQDIPAIRDKIREHPAVIDIYEYDIPFAKRYLIDKGLVPMEGDEELKMLAFDIETLYHEGEEFAEGPILMISYADEEGARVITWKNVDLPYVDVVSTEREMIKRFLRVVKEKDPDVLITYNGDNFDFAYLKKRCEKLGINFALGRDGSEPKIQRMGDRFAVEVKGRIHFDLYPVIRRTINLPTYTLEAVYEAVFGQPKEKVYAEEITTAWETGENLERVARYSMEDAKVTYELGKEFLPMEAQLSRLIGQSLWDVSRSSTGNLVEWFLLRKAYERNELAPNKPDEKELARRRQSYEGGYVKEPERGLWENIVYLDFRSLYPSIIITHNVSPDTLNREGCKEYDVAPQVGHRFCKDFPGFIPSLLGDLLEERQKIKKKMKATIDPIERKLLDYRQRAIKILANSYYGYYGYARARWYCKECAESVTAWGREYITMTIKEIEEKYGFKVIYSDTDGFFATIPGADAETVKKKAMEFLKYINAKLPGALELEYEGFYKRGFFVTKKKYAVIDEEGKITTRGLEIVRRDWSEIAKETQARVLEALLKDGDVEKAVRIVKEVTEKLSKYEVPPEKLVIHEQITRDLKDYKATGPHVAVAKRLAARGVKIRPGTVISYIVLKGSGRIGDRAIPFDEFDPTKHKYDAEYYIENQVLPAVERILRAFGYRKEDLRYQKTRQVGLSAWLKPKGT

SEQ ID NO: 2926 - protein, 774 aa, synthetic construct
MILDTDMITEDGKPVMRIFKKENGEFKIEYDRTFEPYFYALLKDDSAIEEVKKITAERHGTVVTVKRVEKVQKKFLGRPVEVWKLYFTHFQDIPAIADKIREHPAVIDIYEYDIPFAKRYLIDKGLVPMEGDEELKMLAFDIETLYHEGEEFAEGPILMISYADEEGARVITWKNVDLPYVDVVSTEREMIKRFLRVVKEKDPDVLITYNGDNFDFAYLKKRCEKLGINFALGRDGSEPKIQRMGDRFAVEVKGRIHFDLYPVIRRTINLPTYTLEAVYEAVFGQPKEKVYAEEITTAWETGENLERVARYSMEDAKVTYELGKEFLPMEAQLSRLIGQSLWDVSRSSTGNLVEWFLLRKAYERNELAPNKPDEKELARRRQSYEGGYVKEPERGLWENIVYLDFRSLYPSIIITHNVSPDTLNREGCKEYDVAPQVGHRFCKDFPGFIPSLLGDLLEERQKIKKKMKATIDPIERKLLDYRQRAIKILANSYYGYYGYARARWYCKECAESVTAWGREYITMTIKEIEEKYGFKVIYSDTDGFFATIPGADAETVKKKAMEFLKYINAKLPGALELEYEGFYKRGFFVTKKKYAVIDEEGKITTRGLEIVRRDWSEIAKETQARVLEALLKDGDVEKAVRIVKEVTEKLSKYEVPPEKLVIHEQITRDLKDYKATGPHVAVAKRLAARGVKIRPGTVISYIVLKGSGRIGDRAIPFDEFDPTKHKYDAEYYIENQVLPAVERILRAFGYRKEDLRYQKTRQVGLSAWLKPKGT

SEQ ID NO: 2927 - protein, 774 aa, synthetic construct
MILDTDMITEDGKPVMRIFKKENGEFKIEYDRTFEPYFYALLKDDSAIEEVKKITAERHGTVVTVKRVEKVQKKFLGRPVEVWKLYFTHFQDIPAIFDKIREHPAVIDIYEYDIPFAKRYLIDKGLVPMEGDEELKMLAFDIETLYHEGEEFAEGPILMISYADEEGARVITWKNVDLPYVDVVSTEREMIKRFLRVVKEKDPDVLITYNGDNFDFAYLKKRCEKLGINFALGRDGSEPKIQRMGDRFAVEVKGRIHFDLYPVIRRTINLPTYTLEAVYEAVFGQPKEKVYAEEITTAWETGENLERVARYSMEDAKVTYELGKEFLPMEAQLSRLIGQSLWDVSRSSTGNLVEWFLLRKAYERNELAPNKPDEKELARRRQSYEGGYVKEPERGLWENIVYLDFRSLYPSIIITHNVSPDTLNREGCKEYDVAPQVGHRFCKDFPGFIPSLLGDLLEERQKIKKKMKATIDPIERKLLDYRQRAIKILANSYYGYYGYARARWYCKECAESVTAWGREYITMTIKEIEEKYGFKVIYSDTDGFFATIPGADAETVKKKAMEFLKYINAKLPGALELEYEGFYKRGFFVTKKKYAVIDEEGKITTRGLEIVRRDWSEIAKETQARVLEALLKDGDVEKAVRIVKEVTEKLSKYEVPPEKLVIHEQITRDLKDYKATGPHVAVAKRLAARGVKIRPGTVISYIVLKGSGRIGDRAIPFDEFDPTKHKYDAEYYIENQVLPAVERILRAFGYRKEDLRYQKTRQVGLSAWLKPKGT

SEQ ID NO: 2928 - protein, 774 aa, synthetic construct
MILDTDMITEDGKPVMRIFKKENGEFKIEYDRTFEPYFYALLKDDSAIEEVKKITAERHGTVVTVKRVEKVQKKFLGRPVEVWKLYFTHFQDIPAIHDKIREHPAVIDIYEYDIPFAKRYLIDKGLVPMEGDEELKMLAFDIETLYHEGEEFAEGPILMISYADEEGARVITWKNVDLPYVDVVSTEREMIKRFLRVVKEKDPDVLITYNGDNFDFAYLKKRCEKLGINFALGRDGSEPKIQRMGDRFAVEVKGRIHFDLYPVIRRTINLPTYTLEAVYEAVFGQPKEKVYAEEITTAWETGENLERVARYSMEDAKVTYELGKEFLPMEAQLSRLIGQSLWDVSRSSTGNLVEWFLLRKAYERNELAPNKPDEKELARRRQSYEGGYVKEPERGLWENIVYLDFRSLYPSIIITHNVSPDTLNREGCKEYDVAPQVGHRFCKDFPGFIPSLLGDLLEERQKIKKKMKATIDPIERKLLDYRQRAIKILANSYYGYYGYARARWYCKECAESVTAWGREYITMTIKEIEEKYGFKVIYSDTDGFFATIPGADAETVKKKAMEFLKYINAKLPGALELEYEGFYKRGFFVTKKKYAVIDEEGKITTRGLEIVRRDWSEIAKETQARVLEALLKDGDVEKAVRIVKEVTEKLSKYEVPPEKLVIHEQITRDLKDYKATGPHVAVAKRLAARGVKIRPGTVISYIVLKGSGRIGDRAIPFDEFDPTKHKYDAEYYIENQVLPAVERILRAFGYRKEDLRYQKTRQVGLSAWLKPKGT

SEQ ID NO: 2929 - protein, 774 aa, synthetic construct
MILDTDMITEDGKPVMRIFKKENGEFKIEYDRTFEPYFYALLKDDSAIEEVKKITAERHGTVVTVKRVEKVQKKFLGRPVEVWKLYFTHFQDQPAIADKIREHPAVIDIYEYDIPFAKRYLIDKGLVPMEGDEELKMLAFDIETLYHEGEEFAEGPILMISYADEEGARVITWKNVDLPYVDVVSTEREMIKRFLRVVKEKDPDVLITYNGDNFDFAYLKKRCEKLGINFALGRDGSEPKIQRMGDRFAVEVKGRIHFDLYPVIRRTINLPTYTLEAVYEAVFGQPKEKVYAEEITTAWETGENLERVARYSMEDAKVTYELGKEFLPMEAQLSRLIGQSLWDVSRSSTGNLVEWFLLRKAYERNELAPNKPDEKELARRRQSYEGGYVKEPERGLWENIVYLDFRSLYPSIIITHNVSPDTLNREGCKEYDVAPQVGHRFCKDFPGFIPSLLGDLLEERQKIKKKMKATIDPIERKLLDYRQRAIKILANSYYGYYGYARARWYCKECAESVTAWGREYITMTIKEIEEKYGFKVIYSDTDGFFATIPGADAETVKKKAMEFLKYINAKLPGALELEYEGFYKRGFFVTKKKYAVIDEEGKITTRGLEIVRRDWSEIAKETQARVLEALLKDGDVEKAVRIVKEVTEKLSKYEVPPEKLVIHEQITRDLKDYKATGPHVAVAKRLAARGVKIRPGTVISYIVLKGSGRIGDRAIPFDEFDPTKHKYDAEYYIENQVLPAVERILRAFGYRKEDLRYQKTRQVGLSAWLKPKGT

SEQ ID NO: 2930 - protein, 774 aa, synthetic construct
MILDTDMITEDGKPVMRIFKKENGEFKIEYDRTFEPYFYALLKDDSAIEEVKKITAERHGTVVTVKRVEKVQKKFLGRPVEVWKLYFTHIQDVPAIRDKIREHPAVIDIYEYDIPFAKRYLIDKGLVPMEGDEELKMLAFDIETLYHEGEEFAEGPILMISYADEEGARVITWKNVDLPYVDVVSTEREMIKRFLRVVKEKDPDVLITYNGDNFDFAYLKKRCEKLGINFALGRDGSEPKIQRMGDRFAVEVKGRIHFDLYPVIRRTINLPTYTLEAVYEAVFGQPKEKVYAEEITTAWETGENLERVARYSMEDAKVTYELGKEFLPMEAQLSRLIGQSLWDVSRSSTGNLVEWFLLRKAYERNELAPNKPDEKELARRRQSYEGGYVKEPERGLWENIVYLDFRSLYPSIIITHNVSPDTLNREGCKEYDVAPQVGHRFCKDFPGFIPSLLGDLLEERQKIKKKMKATIDPIERKLLDYRQRAIKILANSYYGYYGYARARWYCKECAESVTAWGREYITMTIKEIEEKYGFKVIYSDTDGFFATIPGADAETVKKKAMEFLKYINAKLPGALELEYEGFYKRGFFVTKKKYAVIDEEGKITTRGLEIVRRDWSEIAKETQARVLEALLKDGDVEKAVRIVKEVTEKLSKYEVPPEKLVIHEQITRDLKDYKATGPHVAVAKRLAARGVKIRPGTVISYIVLKGSGRIGDRAIPFDEFDPTKHKYDAEYYIENQVLPAVERILRAFGYRKEDLRYQKTRQVGLSAWLKPKGT

SEQ ID NO: 2931 - protein, 774 aa, synthetic construct
MILDTDMITEDGKPVMRIFKKENGEFKIEYDRTFEPYFYALLKDDSAIEEVKKITAERHGTVVTVKRVEKVQKKFLGRPVEVWKLYFTHIQDVPAIFDKIREHPAVIDIYEYDIPFAKRYLIDKGLVPMEGDEELKMLAFDIETLYHEGEEFAEGPILMISYADEEGARVITWKNVDLPYVDVVSTEREMIKRFLRVVKEKDPDVLITYNGDNFDFAYLKKRCEKLGINFALGRDGSEPKIQRMGDRFAVEVKGRIHFDLYPVIRRTINLPTYTLEAVYEAVFGQPKEKVYAEEITTAWETGENLERVARYSMEDAKVTYELGKEFLPMEAQLSRLIGQSLWDVSRSSTGNLVEWFLLRKAYERNELAPNKPDEKELARRRQSYEGGYVKEPERGLWENIVYLDFRSLYPSIIITHNVSPDTLNREGCKEYDVAPQVGHRFCKDFPGFIPSLLGDLLEERQKIKKKMKATIDPIERKLLDYRQRAIKILANSYYGYYGYARARWYCKECAESVTAWGREYITMTIKEIEEKYGFKVIYSDTDGFFATIPGADAETVKKKAMEFLKYINAKLPGALELEYEGFYKRGFFVTKKKYAVIDEEGKITTRGLEIVRRDWSEIAKETQARVLEALLKDGDVEKAVRIVKEVTEKLSKYEVPPEKLVIHEQITRDLKDYKATGPHVAVAKRLAARGVKIRPGTVISYIVLKGSGRIGDRAIPFDEFDPTKHKYDAEYYIENQVLPAVERILRAFGYRKEDLRYQKTRQVGLSAWLKPKGT

SEQ ID NO: 2932 - protein, 774 aa, synthetic construct
MILDTDMITEDGKPVMRIFKKENGEFKIEYDRTFEPYFYALLKDDSAIEEVKKITAERHGTVVTVKRVEKVQKKFLGRPVEVWKLYFTHIQDIPAIRDKIREHPAVIDIYEYDIPFAKRYLIDKGLVPMEGDEELKMLAFDIETLYHEGEEFAEGPILMISYADEEGARVITWKNVDLPYVDVVSTEREMIKRFLRVVKEKDPDVLITYNGDNFDFAYLKKRCEKLGINFALGRDGSEPKIQRMGDRFAVEVKGRIHFDLYPVIRRTINLPTYTLEAVYEAVFGQPKEKVYAEEITTAWETGENLERVARYSMEDAKVTYELGKEFLPMEAQLSRLIGQSLWDVSRSSTGNLVEWFLLRKAYERNELAPNKPDEKELARRRQSYEGGYVKEPERGLWENIVYLDFRSLYPSIIITHNVSPDTLNREGCKEYDVAPQVGHRFCKDFPGFIPSLLGDLLEERQKIKKKMKATIDPIERKLLDYRQRAIKILANSYYGYYGYARARWYCKECAESVTAWGREYITMTIKEIEEKYGFKVIYSDTDGFFATIPGADAETVKKKAMEFLKYINAKLPGALELEYEGFYKRGFFVTKKKYAVIDEEGKITTRGLEIVRRDWSEIAKETQARVLEALLKDGDVEKAVRIVKEVTEKLSKYEVPPEKLVIHEQITRDLKDYKATGPHVAVAKRLAARGVKIRPGTVISYIVLKGSGRIGDRAIPFDEFDPTKHKYDAEYYIENQVLPAVERILRAFGYRKEDLRYQKTRQVGLSAWLKPKGT

SEQ ID NO: 2933 - protein, 774 aa, synthetic construct
MILDTDMITEDGKPVMRIFKKENGEFKIEYDRTFEPYFYALLKDDSAIEEVKKITAERHGTVVTVKRVEKVQKKFLGRPVEVWKLYFTHIQDIPAIADKIREHPAVIDIYEYDIPFAKRYLIDKGLVPMEGDEELKMLAFDIETLYHEGEEFAEGPILMISYADEEGARVITWKNVDLPYVDVVSTEREMIKRFLRVVKEKDPDVLITYNGDNFDFAYLKKRCEKLGINFALGRDGSEPKIQRMGDRFAVEVKGRIHFDLYPVIRRTINLPTYTLEAVYEAVFGQPKEKVYAEEITTAWETGENLERVARYSMEDAKVTYELGKEFLPMEAQLSRLIGQSLWDVSRSSTGNLVEWFLLRKAYERNELAPNKPDEKELARRRQSYEGGYVKEPERGLWENIVYLDFRSLYPSIIITHNVSPDTLNREGCKEYDVAPQVGHRFCKDFPGFIPSLLGDLLEERQKIKKKMKATIDPIERKLLDYRQRAIKILANSYYGYYGYARARWYCKECAESVTAWGREYITMTIKEIEEKYGFKVIYSDTDGFFATIPGADAETVKKKAMEFLKYINAKLPGALELEYEGFYKRGFFVTKKKYAVIDEEGKITTRGLEIVRRDWSEIAKETQARVLEALLKDGDVEKAVRIVKEVTEKLSKYEVPPEKLVIHEQITRDLKDYKATGPHVAVAKRLAARGVKIRPGTVISYIVLKGSGRIGDRAIPFDEFDPTKHKYDAEYYIENQVLPAVERILRAFGYRKEDLRYQKTRQVGLSAWLKPKGT

SEQ ID NO: 2934 - protein, 774 aa, synthetic construct
MILDTDMITEDGKPVMRIFKKENGEFKIEYDRTFEPYFYALLKDDSAIEEVKKITAERHGTVVTVKRVEKVQKKFLGRPVEVWKLYFTHIQDKPAIWDKIREHPAVIDIYEYDIPFAKRYLIDKGLVPMEGDEELKMLAFDIETLYHEGEEFAEGPILMISYADEEGARVITWKNVDLPYVDVVSTEREMIKRFLRVVKEKDPDVLITYNGDNFDFAYLKKRCEKLGINFALGRDGSEPKIQRMGDRFAVEVKGRIHFDLYPVIRRTINLPTYTLEAVYEAVFGQPKEKVYAEEITTAWETGENLERVARYSMEDAKVTYELGKEFLPMEAQLSRLIGQSLWDVSRSSTGNLVEWFLLRKAYERNELAPNKPDEKELARRRQSYEGGYVKEPERGLWENIVYLDFRSLYPSIIITHNVSPDTLNREGCKEYDVAPQVGHRFCKDFPGFIPSLLGDLLEERQKIKKKMKATIDPIERKLLDYRQRAIKILANSYYGYYGYARARWYCKECAESVTAWGREYITMTIKEIEEKYGFKVIYSDTDGFFATIPGADAETVKKKAMEFLKYINAKLPGALELEYEGFYKRGFFVTKKKYAVIDEEGKITTRGLEIVRRDWSEIAKETQARVLEALLKDGDVEKAVRIVKEVTEKLSKYEVPPEKLVIHEQITRDLKDYKATGPHVAVAKRLAARGVKIRPGTVISYIVLKGSGRIGDRAIPFDEFDPTKHKYDAEYYIENQVLPAVERILRAFGYRKEDLRYQKTRQVGLSAWLKPKGT

SEQ ID NO: 2935 - protein, 774 aa, synthetic construct
MILDTDMITEDGKPVMRIFKKENGEFKIEYDRTFEPYFYALLKDDSAIEEVKKITAERHGTVVTVKRVEKVQKKFLGRPVEVWKLYFTHIQDRPAIRDKIREHPAVIDIYEYDIPFAKRYLIDKGLVPMEGDEELKMLAFDIETLYHEGEEFAEGPILMISYADEEGARVITWKNVDLPYVDVVSTEREMIKRFLRVVKEKDPDVLITYNGDNFDFAYLKKRCEKLGINFALGRDGSEPKIQRMGDRFAVEVKGRIHFDLYPVIRRTINLPTYTLEAVYEAVFGQPKEKVYAEEITTAWETGENLERVARYSMEDAKVTYELGKEFLPMEAQLSRLIGQSLWDVSRSSTGNLVEWFLLRKAYERNELAPNKPDEKELARRRQSYEGGYVKEPERGLWENIVYLDFRSLYPSIIITHNVSPDTLNREGCKEYDVAPQVGHRFCKDFPGFIPSLLGDLLEERQKIKKKMKATIDPIERKLLDYRQRAIKILANSYYGYYGYARARWYCKECAESVTAWGREYITMTIKEIEEKYGFKVIYSDTDGFFATIPGADAETVKKKAMEFLKYINAKLPGALELEYEGFYKRGFFVTKKKYAVIDEEGKITTRGLEIVRRDWSEIAKETQARVLEALLKDGDVEKAVRIVKEVTEKLSKYEVPPEKLVIHEQITRDLKDYKATGPHVAVAKRLAARGVKIRPGTVISYIVLKGSGRIGDRAIPFDEFDPTKHKYDAEYYIENQVLPAVERILRAFGYRKEDLRYQKTRQVGLSAWLKPKGT

SEQ ID NO: 2936 - protein, 774 aa, synthetic construct
MILDTDMITEDGKPVMRIFKKENGEFKIEYDRTFEPYFYALLKDDSAIEEVKKITAERHGTVVTVKRVEKVQKKFLGRPVEVWKLYFTHSQDVPAIRDKIREHPAVIDIYEYDIPFAKRYLIDKGLVPMEGDEELKMLAFDIETLYHEGEEFAEGPILMISYADEEGARVITWKNVDLPYVDVVSTEREMIKRFLRVVKEKDPDVLITYNGDNFDFAYLKKRCEKLGINFALGRDGSEPKIQRMGDRFAVEVKGRIHFDLYPVIRRTINLPTYTLEAVYEAVFGQPKEKVYAEEITTAWETGENLERVARYSMEDAKVTYELGKEFLPMEAQLSRLIGQSLWDVSRSSTGNLVEWFLLRKAYERNELAPNKPDEKELARRRQSYEGGYVKEPERGLWENIVYLDFRSLYPSIIITHNVSPDTLNREGCKEYDVAPQVGHRFCKDFPGFIPSLLGDLLEERQKIKKKMKATIDPIERKLLDYRQRAIKILANSYYGYYGYARARWYCKECAESVTAWGREYITMTIKEIEEKYGFKVIYSDTDGFFATIPGADAETVKKKAMEFLKYINAKLPGALELEYEGFYKRGFFVTKKKYAVIDEEGKITTRGLEIVRRDWSEIAKETQARVLEALLKDGDVEKAVRIVKEVTEKLSKYEVPPEKLVIHEQITRDLKDYKATGPHVAVAKRLAARGVKIRPGTVISYIVLKGSGRIGDRAIPFDEFDPTKHKYDAEYYIENQVLPAVERILRAFGYRKEDLRYQKTRQVGLSAWLKPKGT

SEQ ID NO: 2937 - protein, 774 aa, synthetic construct
MILDTDMITEDGKPVMRIFKKENGEFKIEYDRTFEPYFYALLKDDSAIEEVKKITAERHGTVVTVKRVEKVQKKFLGRPVEVWKLYFTHWQDVPAIRDKIREHPAVIDIYEYDIPFAKRYLIDKGLVPMEGDEELKMLAFDIETLYHEGEEFAEGPILMISYADEEGARVITWKNVDLPYVDVVSTEREMIKRFLRVVKEKDPDVLITYNGDNFDFAYLKKRCEKLGINFALGRDGSEPKIQRMGDRFAVEVKGRIHFDLYPVIRRTINLPTYTLEAVYEAVFGQPKEKVYAEEITTAWETGENLERVARYSMEDAKVTYELGKEFLPMEAQLSRLIGQSLWDVSRSSTGNLVEWFLLRKAYERNELAPNKPDEKELARRRQSYEGGYVKEPERGLWENIVYLDFRSLYPSIIITHNVSPDTLNREGCKEYDVAPQVGHRFCKDFPGFIPSLLGDLLEERQKIKKKMKATIDPIERKLLDYRQRAIKILANSYYGYYGYARARWYCKECAESVTAWGREYITMTIKEIEEKYGFKVIYSDTDGFFATIPGADAETVKKKAMEFLKYINAKLPGALELEYEGFYKRGFFVTKKKYAVIDEEGKITTRGLEIVRRDWSEIAKETQARVLEALLKDGDVEKAVRIVKEVTEKLSKYEVPPEKLVIHEQITRDLKDYKATGPHVAVAKRLAARGVKIRPGTVISYIVLKGSGRIGDRAIPFDEFDPTKHKYDAEYYIENQVLPAVERILRAFGYRKEDLRYQKTRQVGLSAWLKPKGT

SEQ ID NO: 2938 - protein, 774 aa, synthetic construct
MILDTDMITEDGKPVMRIFKKENGEFKIEYDRTFEPYFYALLKDDSAIEEVKKITAERHGTVVTVKRVEKVQKKFLGRPVEVWKLYFTHWQDVPAIHDKIREHPAVIDIYEYDIPFAKRYLIDKGLVPMEGDEELKMLAFDIETLYHEGEEFAEGPILMISYADEEGARVITWKNVDLPYVDVVSTEREMIKRFLRVVKEKDPDVLITYNGDNFDFAYLKKRCEKLGINFALGRDGSEPKIQRMGDRFAVEVKGRIHFDLYPVIRRTINLPTYTLEAVYEAVFGQPKEKVYAEEITTAWETGENLERVARYSMEDAKVTYELGKEFLPMEAQLSRLIGQSLWDVSRSSTGNLVEWFLLRKAYERNELAPNKPDEKELARRRQSYEGGYVKEPERGLWENIVYLDFRSLYPSIIITHNVSPDTLNREGCKEYDVAPQVGHRFCKDFPGFIPSLLGDLLEERQKIKKKMKATIDPIERKLLDYRQRAIKILANSYYGYYGYARARWYCKECAESVTAWGREYITMTIKEIEEKYGFKVIYSDTDGFFATIPGADAETVKKKAMEFLKYINAKLPGALELEYEGFYKRGFFVTKKKYAVIDEEGKITTRGLEIVRRDWSEIAKETQARVLEALLKDGDVEKAVRIVKEVTEKLSKYEVPPEKLVIHEQITRDLKDYKATGPHVAVAKRLAARGVKIRPGTVISYIVLKGSGRIGDRAIPFDEFDPTKHKYDAEYYIENQVLPAVERILRAFGYRKEDLRYQKTRQVGLSAWLKPKGT

SEQ ID NO: 2939 - protein, 774 aa, synthetic construct
MILDTDMITEDGKPVMRIFKKENGEFKIEYDRTFEPYFYALLKDDSAIEEVKKITAERHGTVVTVKRVEKVQKKFLGRPVEVWKLYFTHWQDIPAIRDKIREHPAVIDIYEYDIPFAKRYLIDKGLVPMEGDEELKMLAFDIETLYHEGEEFAEGPILMISYADEEGARVITWKNVDLPYVDVVSTEREMIKRFLRVVKEKDPDVLITYNGDNFDFAYLKKRCEKLGINFALGRDGSEPKIQRMGDRFAVEVKGRIHFDLYPVIRRTINLPTYTLEAVYEAVFGQPKEKVYAEEITTAWETGENLERVARYSMEDAKVTYELGKEFLPMEAQLSRLIGQSLWDVSRSSTGNLVEWFLLRKAYERNELAPNKPDEKELARRRQSYEGGYVKEPERGLWENIVYLDFRSLYPSIIITHNVSPDTLNREGCKEYDVAPQVGHRFCKDFPGFIPSLLGDLLEERQKIKKKMKATIDPIERKLLDYRQRAIKILANSYYGYYGYARARWYCKECAESVTAWGREYITMTIKEIEEKYGFKVIYSDTDGFFATIPGADAETVKKKAMEFLKYINAKLPGALELEYEGFYKRGFFVTKKKYAVIDEEGKITTRGLEIVRRDWSEIAKETQARVLEALLKDGDVEKAVRIVKEVTEKLSKYEVPPEKLVIHEQITRDLKDYKATGPHVAVAKRLAARGVKIRPGTVISYIVLKGSGRIGDRAIPFDEFDPTKHKYDAEYYIENQVLPAVERILRAFGYRKEDLRYQKTRQVGLSAWLKPKGT

SEQ ID NO: 2940 - protein, 774 aa, synthetic construct
MILDTDMITEDGKPVMRIFKKENGEFKIEYDRTFEPYFYALLKDDSAIEEVKKITAERHGTVVTVKRVEKVQKKFLGRPVEVWKLYFTHWQDIPAIADKIREHPAVIDIYEYDIPFAKRYLIDKGLVPMEGDEELKMLAFDIETLYHEGEEFAEGPILMISYADEEGARVITWKNVDLPYVDVVSTEREMIKRFLRVVKEKDPDVLITYNGDNFDFAYLKKRCEKLGINFALGRDGSEPKIQRMGDRFAVEVKGRIHFDLYPVIRRTINLPTYTLEAVYEAVFGQPKEKVYAEEITTAWETGENLERVARYSMEDAKVTYELGKEFLPMEAQLSRLIGQSLWDVSRSSTGNLVEWFLLRKAYERNELAPNKPDEKELARRRQSYEGGYVKEPERGLWENIVYLDFRSLYPSIIITHNVSPDTLNREGCKEYDVAPQVGHRFCKDFPGFIPSLLGDLLEERQKIKKKMKATIDPIERKLLDYRQRAIKILANSYYGYYGYARARWYCKECAESVTAWGREYITMTIKEIEEKYGFKVIYSDTDGFFATIPGADAETVKKKAMEFLKYINAKLPGALELEYEGFYKRGFFVTKKKYAVIDEEGKITTRGLEIVRRDWSEIAKETQARVLEALLKDGDVEKAVRIVKEVTEKLSKYEVPPEKLVIHEQITRDLKDYKATGPHVAVAKRLAARGVKIRPGTVISYIVLKGSGRIGDRAIPFDEFDPTKHKYDAEYYIENQVLPAVERILRAFGYRKEDLRYQKTRQVGLSAWLKPKGT

SEQ ID NO: 2941 - protein, 774 aa, synthetic construct
MILDTDMITEDGKPVMRIFKKENGEFKIEYDRTFEPYFYALLKDDSAIEEVKKITAERHGTVVTVKRVEKVQKKFLGRPVEVWKLYFTHWQDIPAIHDKIREHPAVIDIYEYDIPFAKRYLIDKGLVPMEGDEELKMLAFDIETLYHEGEEFAEGPILMISYADEEGARVITWKNVDLPYVDVVSTEREMIKRFLRVVKEKDPDVLITYNGDNFDFAYLKKRCEKLGINFALGRDGSEPKIQRMGDRFAVEVKGRIHFDLYPVIRRTINLPTYTLEAVYEAVFGQPKEKVYAEEITTAWETGENLERVARYSMEDAKVTYELGKEFLPMEAQLSRLIGQSLWDVSRSSTGNLVEWFLLRKAYERNELAPNKPDEKELARRRQSYEGGYVKEPERGLWENIVYLDFRSLYPSIIITHNVSPDTLNREGCKEYDVAPQVGHRFCKDFPGFIPSLLGDLLEERQKIKKKMKATIDPIERKLLDYRQRAIKILANSYYGYYGYARARWYCKECAESVTAWGREYITMTIKEIEEKYGFKVIYSDTDGFFATIPGADAETVKKKAMEFLKYINAKLPGALELEYEGFYKRGFFVTKKKYAVIDEEGKITTRGLEIVRRDWSEIAKETQARVLEALLKDGDVEKAVRIVKEVTEKLSKYEVPPEKLVIHEQITRDLKDYKATGPHVAVAKRLAARGVKIRPGTVISYIVLKGSGRIGDRAIPFDEFDPTKHKYDAEYYIENQVLPAVERILRAFGYRKEDLRYQKTRQVGLSAWLKPKGT

SEQ ID NO: 2942 - protein, 774 aa, synthetic construct
MILDTDMITEDGKPVMRIFKKENGEFKIEYDRTFEPYFYALLKDDSAIEEVKKITAERHGTVVTVKRVEKVQKKFLGRPVEVWKLYFTHWQDIPAIWDKIREHPAVIDIYEYDIPFAKRYLIDKGLVPMEGDEELKMLAFDIETLYHEGEEFAEGPILMISYADEEGARVITWKNVDLPYVDVVSTEREMIKRFLRVVKEKDPDVLITYNGDNFDFAYLKKRCEKLGINFALGRDGSEPKIQRMGDRFAVEVKGRIHFDLYPVIRRTINLPTYTLEAVYEAVFGQPKEKVYAEEITTAWETGENLERVARYSMEDAKVTYELGKEFLPMEAQLSRLIGQSLWDVSRSSTGNLVEWFLLRKAYERNELAPNKPDEKELARRRQSYEGGYVKEPERGLWENIVYLDFRSLYPSIIITHNVSPDTLNREGCKEYDVAPQVGHRFCKDFPGFIPSLLGDLLEERQKIKKKMKATIDPIERKLLDYRQRAIKILANSYYGYYGYARARWYCKECAESVTAWGREYITMTIKEIEEKYGFKVIYSDTDGFFATIPGADAETVKKKAMEFLKYINAKLPGALELEYEGFYKRGFFVTKKKYAVIDEEGKITTRGLEIVRRDWSEIAKETQARVLEALLKDGDVEKAVRIVKEVTEKLSKYEVPPEKLVIHEQITRDLKDYKATGPHVAVAKRLAARGVKIRPGTVISYIVLKGSGRIGDRAIPFDEFDPTKHKYDAEYYIENQVLPAVERILRAFGYRKEDLRYQKTRQVGLSAWLKPKGT

SEQ ID NO: 2943 - protein, 774 aa, synthetic construct
MILDTDMITEDGKPVMRIFKKENGEFKIEYDRTFEPYFYALLKDDSAIEEVKKITAERHGTVVTVKRVEKVQKKFLGRPVEVWKLYFTHYQDVPAIRDKIREHPAVIDIYEYDIPFAKRYLIDKGLVPMEGDEELKMLAFDIETLYHEGEEFAEGPILMISYADEEGARVITWKNVDLPYVDVVSTEREMIKRFLRVVKEKDPDVLITYNGDNFDFAYLKKRCEKLGINFALGRDGSEPKIQRMGDRFAVEVKGRIHFDLYPVIRRTINLPTYTLEAVYEAVFGQPKEKVYAEEITTAWETGENLERVARYSMEDAKVTYELGKEFLPMEAQLSRLIGQSLWDVSRSSTGNLVEWFLLRKAYERNELAPNKPDEKELARRRQSYEGGYVKEPERGLWENIVYLDFRSLYPSIIITHNVSPDTLNREGCKEYDVAPQVGHRFCKDFPGFIPSLLGDLLEERQKIKKKMKATIDPIERKLLDYRQRAIKILANSYYGYYGYARARWYCKECAESVTAWGREYITMTIKEIEEKYGFKVIYSDTDGFFATIPGADAETVKKKAMEFLKYINAKLPGALELEYEGFYKRGFFVTKKKYAVIDEEGKITTRGLEIVRRDWSEIAKETQARVLEALLKDGDVEKAVRIVKEVTEKLSKYEVPPEKLVIHEQITRDLKDYKATGPHVAVAKRLAARGVKIRPGTVISYIVLKGSGRIGDRAIPFDEFDPTKHKYDAEYYIENQVLPAVERILRAFGYRKEDLRYQKTRQVGLSAWLKPKGT

SEQ ID NO: 2944 - protein, 774 aa, synthetic construct
MILDTDMITEDGKPVMRIFKKENGEFKIEYDRTFEPYFYALLKDDSAIEEVKKITAERHGTVVTVKRVEKVQKKFLGRPVEVWKLYFTHYQDVPAIADKIREHPAVIDIYEYDIPFAKRYLIDKGLVPMEGDEELKMLAFDIETLYHEGEEFAEGPILMISYADEEGARVITWKNVDLPYVDVVSTEREMIKRFLRVVKEKDPDVLITYNGDNFDFAYLKKRCEKLGINFALGRDGSEPKIQRMGDRFAVEVKGRIHFDLYPVIRRTINLPTYTLEAVYEAVFGQPKEKVYAEEITTAWETGENLERVARYSMEDAKVTYELGKEFLPMEAQLSRLIGQSLWDVSRSSTGNLVEWFLLRKAYERNELAPNKPDEKELARRRQSYEGGYVKEPERGLWENIVYLDFRSLYPSIIITHNVSPDTLNREGCKEYDVAPQVGHRFCKDFPGFIPSLLGDLLEERQKIKKKMKATIDPIERKLLDYRQRAIKILANSYYGYYGYARARWYCKECAESVTAWGREYITMTIKEIEEKYGFKVIYSDTDGFFATIPGADAETVKKKAMEFLKYINAKLPGALELEYEGFYKRGFFVTKKKYAVIDEEGKITTRGLEIVRRDWSEIAKETQARVLEALLKDGDVEKAVRIVKEVTEKLSKYEVPPEKLVIHEQITRDLKDYKATGPHVAVAKRLAARGVKIRPGTVISYIVLKGSGRIGDRAIPFDEFDPTKHKYDAEYYIENQVLPAVERILRAFGYRKEDLRYQKTRQVGLSAWLKPKGT

SEQ ID NO: 2945 - protein, 774 aa, synthetic construct
MILDTDMITEDGKPVMRIFKKENGEFKIEYDRTFEPYFYALLKDDSAIEEVKKITAERHGTVVTVKRVEKVQKKFLGRPVEVWKLYFTHYQDIPAIRDKIREHPAVIDIYEYDIPFAKRYLIDKGLVPMEGDEELKMLAFDIETLYHEGEEFAEGPILMISYADEEGARVITWKNVDLPYVDVVSTEREMIKRFLRVVKEKDPDVLITYNGDNFDFAYLKKRCEKLGINFALGRDGSEPKIQRMGDRFAVEVKGRIHFDLYPVIRRTINLPTYTLEAVYEAVFGQPKEKVYAEEITTAWETGENLERVARYSMEDAKVTYELGKEFLPMEAQLSRLIGQSLWDVSRSSTGNLVEWFLLRKAYERNELAPNKPDEKELARRRQSYEGGYVKEPERGLWENIVYLDFRSLYPSIIITHNVSPDTLNREGCKEYDVAPQVGHRFCKDFPGFIPSLLGDLLEERQKIKKKMKATIDPIERKLLDYRQRAIKILANSYYGYYGYARARWYCKECAESVTAWGREYITMTIKEIEEKYGFKVIYSDTDGFFATIPGADAETVKKKAMEFLKYINAKLPGALELEYEGFYKRGFFVTKKKYAVIDEEGKITTRGLEIVRRDWSEIAKETQARVLEALLKDGDVEKAVRIVKEVTEKLSKYEVPPEKLVIHEQITRDLKDYKATGPHVAVAKRLAARGVKIRPGTVISYIVLKGSGRIGDRAIPFDEFDPTKHKYDAEYYIENQVLPAVERILRAFGYRKEDLRYQKTRQVGLSAWLKPKGT

SEQ ID NO: 2946 - protein, 774 aa, synthetic construct
MILDTDMITEDGKPVMRIFKKENGEFKIEYDRTFEPYFYALLKDDSAIEEVKKITAERHGTVVTVKRVEKVQKKFLGRPVEVWKLYFTHYQDIPAIADKIREHPAVIDIYEYDIPFAKRYLIDKGLVPMEGDEELKMLAFDIETLYHEGEEFAEGPILMISYADEEGARVITWKNVDLPYVDVVSTEREMIKRFLRVVKEKDPDVLITYNGDNFDFAYLKKRCEKLGINFALGRDGSEPKIQRMGDRFAVEVKGRIHFDLYPVIRRTINLPTYTLEAVYEAVFGQPKEKVYAEEITTAWETGENLERVARYSMEDAKVTYELGKEFLPMEAQLSRLIGQSLWDVSRSSTGNLVEWFLLRKAYERNELAPNKPDEKELARRRQSYEGGYVKEPERGLWENIVYLDFRSLYPSIIITHNVSPDTLNREGCKEYDVAPQVGHRFCKDFPGFIPSLLGDLLEERQKIKKKMKATIDPIERKLLDYRQRAIKILANSYYGYYGYARARWYCKECAESVTAWGREYITMTIKEIEEKYGFKVIYSDTDGFFATIPGADAETVKKKAMEFLKYINAKLPGALELEYEGFYKRGFFVTKKKYAVIDEEGKITTRGLEIVRRDWSEIAKETQARVLEALLKDGDVEKAVRIVKEVTEKLSKYEVPPEKLVIHEQITRDLKDYKATGPHVAVAKRLAARGVKIRPGTVISYIVLKGSGRIGDRAIPFDEFDPTKHKYDAEYYIENQVLPAVERILRAFGYRKEDLRYQKTRQVGLSAWLKPKGT

SEQ ID NO: 2947 - protein, 774 aa, synthetic construct
MILDTDMITEDGKPVMRIFKKENGEFKIEYDRTFEPYFYALLKDDSAIEEVKKITAERHGTVVTVKRVEKVQKKFLGRPVEVWKLYFTHYQDIPAIHDKIREHPAVIDIYEYDIPFAKRYLIDKGLVPMEGDEELKMLAFDIETLYHEGEEFAEGPILMISYADEEGARVITWKNVDLPYVDVVSTEREMIKRFLRVVKEKDPDVLITYNGDNFDFAYLKKRCEKLGINFALGRDGSEPKIQRMGDRFAVEVKGRIHFDLYPVIRRTINLPTYTLEAVYEAVFGQPKEKVYAEEITTAWETGENLERVARYSMEDAKVTYELGKEFLPMEAQLSRLIGQSLWDVSRSSTGNLVEWFLLRKAYERNELAPNKPDEKELARRRQSYEGGYVKEPERGLWENIVYLDFRSLYPSIIITHNVSPDTLNREGCKEYDVAPQVGHRFCKDFPGFIPSLLGDLLEERQKIKKKMKATIDPIERKLLDYRQRAIKILANSYYGYYGYARARWYCKECAESVTAWGREYITMTIKEIEEKYGFKVIYSDTDGFFATIPGADAETVKKKAMEFLKYINAKLPGALELEYEGFYKRGFFVTKKKYAVIDEEGKITTRGLEIVRRDWSEIAKETQARVLEALLKDGDVEKAVRIVKEVTEKLSKYEVPPEKLVIHEQITRDLKDYKATGPHVAVAKRLAARGVKIRPGTVISYIVLKGSGRIGDRAIPFDEFDPTKHKYDAEYYIENQVLPAVERILRAFGYRKEDLRYQKTRQVGLSAWLKPKGT

SEQ ID NO: 2948 - protein, 774 aa, synthetic construct
MILDTDMITEDGKPVMRIFKKENGEFKIEYDRTFEPYFYALLKDDSAIEEVKKITAERHGTVVTVKRVEKVQKKFLGRPVEVWKLYFTHYQDQPAIADKIREHPAVIDIYEYDIPFAKRYLIDKGLVPMEGDEELKMLAFDIETLYHEGEEFAEGPILMISYADEEGARVITWKNVDLPYVDVVSTEREMIKRFLRVVKEKDPDVLITYNGDNFDFAYLKKRCEKLGINFALGRDGSEPKIQRMGDRFAVEVKGRIHFDLYPVIRRTINLPTYTLEAVYEAVFGQPKEKVYAEEITTAWETGENLERVARYSMEDAKVTYELGKEFLPMEAQLSRLIGQSLWDVSRSSTGNLVEWFLLRKAYERNELAPNKPDEKELARRRQSYEGGYVKEPERGLWENIVYLDFRSLYPSIIITHNVSPDTLNREGCKEYDVAPQVGHRFCKDFPGFIPSLLGDLLEERQKIKKKMKATIDPIERKLLDYRQRAIKILANSYYGYYGYARARWYCKECAESVTAWGREYITMTIKEIEEKYGFKVIYSDTDGFFATIPGADAETVKKKAMEFLKYINAKLPGALELEYEGFYKRGFFVTKKKYAVIDEEGKITTRGLEIVRRDWSEIAKETQARVLEALLKDGDVEKAVRIVKEVTEKLSKYEVPPEKLVIHEQITRDLKDYKATGPHVAVAKRLAARGVKIRPGTVISYIVLKGSGRIGDRAIPFDEFDPTKHKYDAEYYIENQVLPAVERILRAFGYRKEDLRYQKTRQVGLSAWLKPKGT

SEQ ID NO: 2949 - protein, 774 aa, synthetic construct
MILDTDMITEDGKPVMRIFKKENGEFKIEYDRTFEPYFYALLKDDSAIEEVKKITAERHGTVVTVKRVEKVQKKFLGRPVEVWKLYFTHPQDVPAIADKIREHPAVIDIYEYDIPFAKRYLIDKGLVPMEGDEELKMLAFDIETLYHEGEEFAEGPILMISYADEEGARVITWKNVDLPYVDVVSTEREMIKRFLRVVKEKDPDVLITYNGDNFDFAYLKKRCEKLGINFALGRDGSEPKIQRMGDRFAVEVKGRIHFDLYPVIRRTINLPTYTLEAVYEAVFGQPKEKVYAEEITTAWETGENLERVARYSMEDAKVTYELGKEFLPMEAQLSRLIGQSLWDVSRSSTGNLVEWFLLRKAYERNELAPNKPDEKELARRRQSYEGGYVKEPERGLWENIVYLDFRSLYPSIIITHNVSPDTLNREGCKEYDVAPQVGHRFCKDFPGFIPSLLGDLLEERQKIKKKMKATIDPIERKLLDYRQRAIKILANSYYGYYGYARARWYCKECAESVTAWGREYITMTIKEIEEKYGFKVIYSDTDGFFATIPGADAETVKKKAMEFLKYINAKLPGALELEYEGFYKRGFFVTKKKYAVIDEEGKITTRGLEIVRRDWSEIAKETQARVLEALLKDGDVEKAVRIVKEVTEKLSKYEVPPEKLVIHEQITRDLKDYKATGPHVAVAKRLAARGVKIRPGTVISYIVLKGSGRIGDRAIPFDEFDPTKHKYDAEYYIENQVLPAVERILRAFGYRKEDLRYQKTRQVGLSAWLKPKGT

SEQ ID NO: 2950 - protein, 774 aa, synthetic construct
MILDTDMITEDGKPVMRIFKKENGEFKIEYDRTFEPYFYALLKDDSAIEEVKKITAERHGTVVTVKRVEKVQKKFLGRPVEVWKLYFTHPQDVPAIFDKIREHPAVIDIYEYDIPFAKRYLIDKGLVPMEGDEELKMLAFDIETLYHEGEEFAEGPILMISYADEEGARVITWKNVDLPYVDVVSTEREMIKRFLRVVKEKDPDVLITYNGDNFDFAYLKKRCEKLGINFALGRDGSEPKIQRMGDRFAVEVKGRIHFDLYPVIRRTINLPTYTLEAVYEAVFGQPKEKVYAEEITTAWETGENLERVARYSMEDAKVTYELGKEFLPMEAQLSRLIGQSLWDVSRSSTGNLVEWFLLRKAYERNELAPNKPDEKELARRRQSYEGGYVKEPERGLWENIVYLDFRSLYPSIIITHNVSPDTLNREGCKEYDVAPQVGHRFCKDFPGFIPSLLGDLLEERQKIKKKMKATIDPIERKLLDYRQRAIKILANSYYGYYGYARARWYCKECAESVTAWGREYITMTIKEIEEKYGFKVIYSDTDGFFATIPGADAETVKKKAMEFLKYINAKLPGALELEYEGFYKRGFFVTKKKYAVIDEEGKITTRGLEIVRRDWSEIAKETQARVLEALLKDGDVEKAVRIVKEVTEKLSKYEVPPEKLVIHEQITRDLKDYKATGPHVAVAKRLAARGVKIRPGTVISYIVLKGSGRIGDRAIPFDEFDPTKHKYDAEYYIENQVLPAVERILRAFGYRKEDLRYQKTRQVGLSAWLKPKGT

SEQ ID NO: 2951 - protein, 774 aa, synthetic construct
MILDTDMITEDGKPVMRIFKKENGEFKIEYDRTFEPYFYALLKDDSAIEEVKKITAERHGTVVTVKRVEKVQKKFLGRPVEVWKLYFTHPQDVPAIHDKIREHPAVIDIYEYDIPFAKRYLIDKGLVPMEGDEELKMLAFDIETLYHEGEEFAEGPILMISYADEEGARVITWKNVDLPYVDVVSTEREMIKRFLRVVKEKDPDVLITYNGDNFDFAYLKKRCEKLGINFALGRDGSEPKIQRMGDRFAVEVKGRIHFDLYPVIRRTINLPTYTLEAVYEAVFGQPKEKVYAEEITTAWETGENLERVARYSMEDAKVTYELGKEFLPMEAQLSRLIGQSLWDVSRSSTGNLVEWFLLRKAYERNELAPNKPDEKELARRRQSYEGGYVKEPERGLWENIVYLDFRSLYPSIIITHNVSPDTLNREGCKEYDVAPQVGHRFCKDFPGFIPSLLGDLLEERQKIKKKMKATIDPIERKLLDYRQRAIKILANSYYGYYGYARARWYCKECAESVTAWGREYITMTIKEIEEKYGFKVIYSDTDGFFATIPGADAETVKKKAMEFLKYINAKLPGALELEYEGFYKRGFFVTKKKYAVIDEEGKITTRGLEIVRRDWSEIAKETQARVLEALLKDGDVEKAVRIVKEVTEKLSKYEVPPEKLVIHEQITRDLKDYKATGPHVAVAKRLAARGVKIRPGTVISYIVLKGSGRIGDRAIPFDEFDPTKHKYDAEYYIENQVLPAVERILRAFGYRKEDLRYQKTRQVGLSAWLKPKGT

SEQ ID NO: 2952 - protein, 774 aa, synthetic construct
MILDTDMITEDGKPVMRIFKKENGEFKIEYDRTFEPYFYALLKDDSAIEEVKKITAERHGTVVTVKRVEKVQKKFLGRPVEVWKLYFTHPQDVPAIWDKIREHPAVIDIYEYDIPFAKRYLIDKGLVPMEGDEELKMLAFDIETLYHEGEEFAEGPILMISYADEEGARVITWKNVDLPYVDVVSTEREMIKRFLRVVKEKDPDVLITYNGDNFDFAYLKKRCEKLGINFALGRDGSEPKIQRMGDRFAVEVKGRIHFDLYPVIRRTINLPTYTLEAVYEAVFGQPKEKVYAEEITTAWETGENLERVARYSMEDAKVTYELGKEFLPMEAQLSRLIGQSLWDVSRSSTGNLVEWFLLRKAYERNELAPNKPDEKELARRRQSYEGGYVKEPERGLWENIVYLDFRSLYPSIIITHNVSPDTLNREGCKEYDVAPQVGHRFCKDFPGFIPSLLGDLLEERQKIKKKMKATIDPIERKLLDYRQRAIKILANSYYGYYGYARARWYCKECAESVTAWGREYITMTIKEIEEKYGFKVIYSDTDGFFATIPGADAETVKKKAMEFLKYINAKLPGALELEYEGFYKRGFFVTKKKYAVIDEEGKITTRGLEIVRRDWSEIAKETQARVLEALLKDGDVEKAVRIVKEVTEKLSKYEVPPEKLVIHEQITRDLKDYKATGPHVAVAKRLAARGVKIRPGTVISYIVLKGSGRIGDRAIPFDEFDPTKHKYDAEYYIENQVLPAVERILRAFGYRKEDLRYQKTRQVGLSAWLKPKGT

SEQ ID NO: 2953 - protein, 774 aa, synthetic construct
MILDTDMITEDGKPVMRIFKKENGEFKIEYDRTFEPYFYALLKDDSAIEEVKKITAERHGTVVTVKRVEKVQKKFLGRPVEVWKLYFTHPQDIPAIRDKIREHPAVIDIYEYDIPFAKRYLIDKGLVPMEGDEELKMLAFDIETLYHEGEEFAEGPILMISYADEEGARVITWKNVDLPYVDVVSTEREMIKRFLRVVKEKDPDVLITYNGDNFDFAYLKKRCEKLGINFALGRDGSEPKIQRMGDRFAVEVKGRIHFDLYPVIRRTINLPTYTLEAVYEAVFGQPKEKVYAEEITTAWETGENLERVARYSMEDAKVTYELGKEFLPMEAQLSRLIGQSLWDVSRSSTGNLVEWFLLRKAYERNELAPNKPDEKELARRRQSYEGGYVKEPERGLWENIVYLDFRSLYPSIIITHNVSPDTLNREGCKEYDVAPQVGHRFCKDFPGFIPSLLGDLLEERQKIKKKMKATIDPIERKLLDYRQRAIKILANSYYGYYGYARARWYCKECAESVTAWGREYITMTIKEIEEKYGFKVIYSDTDGFFATIPGADAETVKKKAMEFLKYINAKLPGALELEYEGFYKRGFFVTKKKYAVIDEEGKITTRGLEIVRRDWSEIAKETQARVLEALLKDGDVEKAVRIVKEVTEKLSKYEVPPEKLVIHEQITRDLKDYKATGPHVAVAKRLAARGVKIRPGTVISYIVLKGSGRIGDRAIPFDEFDPTKHKYDAEYYIENQVLPAVERILRAFGYRKEDLRYQKTRQVGLSAWLKPKGT

SEQ ID NO: 2954 - protein, 774 aa, synthetic construct
MILDTDMITEDGKPVMRIFKKENGEFKIEYDRTFEPYFYALLKDDSAIEEVKKITAERHGTVVTVKRVEKVQKKFLGRPVEVWKLYFTHPQDIPAIADKIREHPAVIDIYEYDIPFAKRYLIDKGLVPMEGDEELKMLAFDIETLYHEGEEFAEGPILMISYADEEGARVITWKNVDLPYVDVVSTEREMIKRFLRVVKEKDPDVLITYNGDNFDFAYLKKRCEKLGINFALGRDGSEPKIQRMGDRFAVEVKGRIHFDLYPVIRRTINLPTYTLEAVYEAVFGQPKEKVYAEEITTAWETGENLERVARYSMEDAKVTYELGKEFLPMEAQLSRLIGQSLWDVSRSSTGNLVEWFLLRKAYERNELAPNKPDEKELARRRQSYEGGYVKEPERGLWENIVYLDFRSLYPSIIITHNVSPDTLNREGCKEYDVAPQVGHRFCKDFPGFIPSLLGDLLEERQKIKKKMKATIDPIERKLLDYRQRAIKILANSYYGYYGYARARWYCKECAESVTAWGREYITMTIKEIEEKYGFKVIYSDTDGFFATIPGADAETVKKKAMEFLKYINAKLPGALELEYEGFYKRGFFVTKKKYAVIDEEGKITTRGLEIVRRDWSEIAKETQARVLEALLKDGDVEKAVRIVKEVTEKLSKYEVPPEKLVIHEQITRDLKDYKATGPHVAVAKRLAARGVKIRPGTVISYIVLKGSGRIGDRAIPFDEFDPTKHKYDAEYYIENQVLPAVERILRAFGYRKEDLRYQKTRQVGLSAWLKPKGT

SEQ ID NO: 2955 - protein, 774 aa, synthetic construct
MILDTDMITEDGKPVMRIFKKENGEFKIEYDRTFEPYFYALLKDDSAIEEVKKITAERHGTVVTVKRVEKVQKKFLGRPVEVWKLYFTHPQDIPAIFDKIREHPAVIDIYEYDIPFAKRYLIDKGLVPMEGDEELKMLAFDIETLYHEGEEFAEGPILMISYADEEGARVITWKNVDLPYVDVVSTEREMIKRFLRVVKEKDPDVLITYNGDNFDFAYLKKRCEKLGINFALGRDGSEPKIQRMGDRFAVEVKGRIHFDLYPVIRRTINLPTYTLEAVYEAVFGQPKEKVYAEEITTAWETGENLERVARYSMEDAKVTYELGKEFLPMEAQLSRLIGQSLWDVSRSSTGNLVEWFLLRKAYERNELAPNKPDEKELARRRQSYEGGYVKEPERGLWENIVYLDFRSLYPSIIITHNVSPDTLNREGCKEYDVAPQVGHRFCKDFPGFIPSLLGDLLEERQKIKKKMKATIDPIERKLLDYRQRAIKILANSYYGYYGYARARWYCKECAESVTAWGREYITMTIKEIEEKYGFKVIYSDTDGFFATIPGADAETVKKKAMEFLKYINAKLPGALELEYEGFYKRGFFVTKKKYAVIDEEGKITTRGLEIVRRDWSEIAKETQARVLEALLKDGDVEKAVRIVKEVTEKLSKYEVPPEKLVIHEQITRDLKDYKATGPHVAVAKRLAARGVKIRPGTVISYIVLKGSGRIGDRAIPFDEFDPTKHKYDAEYYIENQVLPAVERILRAFGYRKEDLRYQKTRQVGLSAWLKPKGT

SEQ ID NO: 2956 - protein, 774 aa, synthetic construct
MILDTDMITEDGKPVMRIFKKENGEFKIEYDRTFEPYFYALLKDDSAIEEVKKITAERHGTVVTVKRVEKVQKKFLGRPVEVWKLYFTHPQDIPAIHDKIREHPAVIDIYEYDIPFAKRYLIDKGLVPMEGDEELKMLAFDIETLYHEGEEFAEGPILMISYADEEGARVITWKNVDLPYVDVVSTEREMIKRFLRVVKEKDPDVLITYNGDNFDFAYLKKRCEKLGINFALGRDGSEPKIQRMGDRFAVEVKGRIHFDLYPVIRRTINLPTYTLEAVYEAVFGQPKEKVYAEEITTAWETGENLERVARYSMEDAKVTYELGKEFLPMEAQLSRLIGQSLWDVSRSSTGNLVEWFLLRKAYERNELAPNKPDEKELARRRQSYEGGYVKEPERGLWENIVYLDFRSLYPSIIITHNVSPDTLNREGCKEYDVAPQVGHRFCKDFPGFIPSLLGDLLEERQKIKKKMKATIDPIERKLLDYRQRAIKILANSYYGYYGYARARWYCKECAESVTAWGREYITMTIKEIEEKYGFKVIYSDTDGFFATIPGADAETVKKKAMEFLKYINAKLPGALELEYEGFYKRGFFVTKKKYAVIDEEGKITTRGLEIVRRDWSEIAKETQARVLEALLKDGDVEKAVRIVKEVTEKLSKYEVPPEKLVIHEQITRDLKDYKATGPHVAVAKRLAARGVKIRPGTVISYIVLKGSGRIGDRAIPFDEFDPTKHKYDAEYYIENQVLPAVERILRAFGYRKEDLRYQKTRQVGLSAWLKPKGT

SEQ ID NO: 2957 - protein, 774 aa, synthetic construct
MILDTDMITEDGKPVMRIFKKENGEFKIEYDRTFEPYFYALLKDDSAIEEVKKITAERHGTVVTVKRVEKVQKKFLGRPVEVWKLYFTHPQDIPAIWDKIREHPAVIDIYEYDIPFAKRYLIDKGLVPMEGDEELKMLAFDIETLYHEGEEFAEGPILMISYADEEGARVITWKNVDLPYVDVVSTEREMIKRFLRVVKEKDPDVLITYNGDNFDFAYLKKRCEKLGINFALGRDGSEPKIQRMGDRFAVEVKGRIHFDLYPVIRRTINLPTYTLEAVYEAVFGQPKEKVYAEEITTAWETGENLERVARYSMEDAKVTYELGKEFLPMEAQLSRLIGQSLWDVSRSSTGNLVEWFLLRKAYERNELAPNKPDEKELARRRQSYEGGYVKEPERGLWENIVYLDFRSLYPSIIITHNVSPDTLNREGCKEYDVAPQVGHRFCKDFPGFIPSLLGDLLEERQKIKKKMKATIDPIERKLLDYRQRAIKILANSYYGYYGYARARWYCKECAESVTAWGREYITMTIKEIEEKYGFKVIYSDTDGFFATIPGADAETVKKKAMEFLKYINAKLPGALELEYEGFYKRGFFVTKKKYAVIDEEGKITTRGLEIVRRDWSEIAKETQARVLEALLKDGDVEKAVRIVKEVTEKLSKYEVPPEKLVIHEQITRDLKDYKATGPHVAVAKRLAARGVKIRPGTVISYIVLKGSGRIGDRAIPFDEFDPTKHKYDAEYYIENQVLPAVERILRAFGYRKEDLRYQKTRQVGLSAWLKPKGT

SEQ ID NO: 2958 - protein, 774 aa, synthetic construct
MILDTDMITEDGKPVMRIFKKENGEFKIEYDRTFEPYFYALLKDDSAIEEVKKITAERHGTVVTVKRVEKVQKKFLGRPVEVWKLYFTHPQDKPAIRDKIREHPAVIDIYEYDIPFAKRYLIDKGLVPMEGDEELKMLAFDIETLYHEGEEFAEGPILMISYADEEGARVITWKNVDLPYVDVVSTEREMIKRFLRVVKEKDPDVLITYNGDNFDFAYLKKRCEKLGINFALGRDGSEPKIQRMGDRFAVEVKGRIHFDLYPVIRRTINLPTYTLEAVYEAVFGQPKEKVYAEEITTAWETGENLERVARYSMEDAKVTYELGKEFLPMEAQLSRLIGQSLWDVSRSSTGNLVEWFLLRKAYERNELAPNKPDEKELARRRQSYEGGYVKEPERGLWENIVYLDFRSLYPSIIITHNVSPDTLNREGCKEYDVAPQVGHRFCKDFPGFIPSLLGDLLEERQKIKKKMKATIDPIERKLLDYRQRAIKILANSYYGYYGYARARWYCKECAESVTAWGREYITMTIKEIEEKYGFKVIYSDTDGFFATIPGADAETVKKKAMEFLKYINAKLPGALELEYEGFYKRGFFVTKKKYAVIDEEGKITTRGLEIVRRDWSEIAKETQARVLEALLKDGDVEKAVRIVKEVTEKLSKYEVPPEKLVIHEQITRDLKDYKATGPHVAVAKRLAARGVKIRPGTVISYIVLKGSGRIGDRAIPFDEFDPTKHKYDAEYYIENQVLPAVERILRAFGYRKEDLRYQKTRQVGLSAWLKPKGT

SEQ ID NO: 2959 - protein, 774 aa, synthetic construct
MILDTDMITEDGKPVMRIFKKENGEFKIEYDRTFEPYFYALLKDDSAIEEVKKITAERHGTVVTVKRVEKVQKKFLGRPVEVWKLYFTHPQDKPAIADKIREHPAVIDIYEYDIPFAKRYLIDKGLVPMEGDEELKMLAFDIETLYHEGEEFAEGPILMISYADEEGARVITWKNVDLPYVDVVSTEREMIKRFLRVVKEKDPDVLITYNGDNFDFAYLKKRCEKLGINFALGRDGSEPKIQRMGDRFAVEVKGRIHFDLYPVIRRTINLPTYTLEAVYEAVFGQPKEKVYAEEITTAWETGENLERVARYSMEDAKVTYELGKEFLPMEAQLSRLIGQSLWDVSRSSTGNLVEWFLLRKAYERNELAPNKPDEKELARRRQSYEGGYVKEPERGLWENIVYLDFRSLYPSIIITHNVSPDTLNREGCKEYDVAPQVGHRFCKDFPGFIPSLLGDLLEERQKIKKKMKATIDPIERKLLDYRQRAIKILANSYYGYYGYARARWYCKECAESVTAWGREYITMTIKEIEEKYGFKVIYSDTDGFFATIPGADAETVKKKAMEFLKYINAKLPGALELEYEGFYKRGFFVTKKKYAVIDEEGKITTRGLEIVRRDWSEIAKETQARVLEALLKDGDVEKAVRIVKEVTEKLSKYEVPPEKLVIHEQITRDLKDYKATGPHVAVAKRLAARGVKIRPGTVISYIVLKGSGRIGDRAIPFDEFDPTKHKYDAEYYIENQVLPAVERILRAFGYRKEDLRYQKTRQVGLSAWLKPKGT

SEQ ID NO: 2960 - protein, 774 aa, synthetic construct
MILDTDMITEDGKPVMRIFKKENGEFKIEYDRTFEPYFYALLKDDSAIEEVKKITAERHGTVVTVKRVEKVQKKFLGRPVEVWKLYFTHPQDKPAIHDKIREHPAVIDIYEYDIPFAKRYLIDKGLVPMEGDEELKMLAFDIETLYHEGEEFAEGPILMISYADEEGARVITWKNVDLPYVDVVSTEREMIKRFLRVVKEKDPDVLITYNGDNFDFAYLKKRCEKLGINFALGRDGSEPKIQRMGDRFAVEVKGRIHFDLYPVIRRTINLPTYTLEAVYEAVFGQPKEKVYAEEITTAWETGENLERVARYSMEDAKVTYELGKEFLPMEAQLSRLIGQSLWDVSRSSTGNLVEWFLLRKAYERNELAPNKPDEKELARRRQSYEGGYVKEPERGLWENIVYLDFRSLYPSIIITHNVSPDTLNREGCKEYDVAPQVGHRFCKDFPGFIPSLLGDLLEERQKIKKKMKATIDPIERKLLDYRQRAIKILANSYYGYYGYARARWYCKECAESVTAWGREYITMTIKEIEEKYGFKVIYSDTDGFFATIPGADAETVKKKAMEFLKYINAKLPGALELEYEGFYKRGFFVTKKKYAVIDEEGKITTRGLEIVRRDWSEIAKETQARVLEALLKDGDVEKAVRIVKEVTEKLSKYEVPPEKLVIHEQITRDLKDYKATGPHVAVAKRLAARGVKIRPGTVISYIVLKGSGRIGDRAIPFDEFDPTKHKYDAEYYIENQVLPAVERILRAFGYRKEDLRYQKTRQVGLSAWLKPKGT

SEQ ID NO: 2961 - protein, 774 aa, synthetic construct
MILDTDMITEDGKPVMRIFKKENGEFKIEYDRTFEPYFYALLKDDSAIEEVKKITAERHGTVVTVKRVEKVQKKFLGRPVEVWKLYFTHPQDKPAIWDKIREHPAVIDIYEYDIPFAKRYLIDKGLVPMEGDEELKMLAFDIETLYHEGEEFAEGPILMISYADEEGARVITWKNVDLPYVDVVSTEREMIKRFLRVVKEKDPDVLITYNGDNFDFAYLKKRCEKLGINFALGRDGSEPKIQRMGDRFAVEVKGRIHFDLYPVIRRTINLPTYTLEAVYEAVFGQPKEKVYAEEITTAWETGENLERVARYSMEDAKVTYELGKEFLPMEAQLSRLIGQSLWDVSRSSTGNLVEWFLLRKAYERNELAPNKPDEKELARRRQSYEGGYVKEPERGLWENIVYLDFRSLYPSIIITHNVSPDTLNREGCKEYDVAPQVGHRFCKDFPGFIPSLLGDLLEERQKIKKKMKATIDPIERKLLDYRQRAIKILANSYYGYYGYARARWYCKECAESVTAWGREYITMTIKEIEEKYGFKVIYSDTDGFFATIPGADAETVKKKAMEFLKYINAKLPGALELEYEGFYKRGFFVTKKKYAVIDEEGKITTRGLEIVRRDWSEIAKETQARVLEALLKDGDVEKAVRIVKEVTEKLSKYEVPPEKLVIHEQITRDLKDYKATGPHVAVAKRLAARGVKIRPGTVISYIVLKGSGRIGDRAIPFDEFDPTKHKYDAEYYIENQVLPAVERILRAFGYRKEDLRYQKTRQVGLSAWLKPKGT

SEQ ID NO: 2962 - protein, 774 aa, synthetic construct
MILDTDMITEDGKPVMRIFKKENGEFKIEYDRTFEPYFYALLKDDSAIEEVKKITAERHGTVVTVKRVEKVQKKFLGRPVEVWKLYFTHPQDQPAIFDKIREHPAVIDIYEYDIPFAKRYLIDKGLVPMEGDEELKMLAFDIETLYHEGEEFAEGPILMISYADEEGARVITWKNVDLPYVDVVSTEREMIKRFLRVVKEKDPDVLITYNGDNFDFAYLKKRCEKLGINFALGRDGSEPKIQRMGDRFAVEVKGRIHFDLYPVIRRTINLPTYTLEAVYEAVFGQPKEKVYAEEITTAWETGENLERVARYSMEDAKVTYELGKEFLPMEAQLSRLIGQSLWDVSRSSTGNLVEWFLLRKAYERNELAPNKPDEKELARRRQSYEGGYVKEPERGLWENIVYLDFRSLYPSIIITHNVSPDTLNREGCKEYDVAPQVGHRFCKDFPGFIPSLLGDLLEERQKIKKKMKATIDPIERKLLDYRQRAIKILANSYYGYYGYARARWYCKECAESVTAWGREYITMTIKEIEEKYGFKVIYSDTDGFFATIPGADAETVKKKAMEFLKYINAKLPGALELEYEGFYKRGFFVTKKKYAVIDEEGKITTRGLEIVRRDWSEIAKETQARVLEALLKDGDVEKAVRIVKEVTEKLSKYEVPPEKLVIHEQITRDLKDYKATGPHVAVAKRLAARGVKIRPGTVISYIVLKGSGRIGDRAIPFDEFDPTKHKYDAEYYIENQVLPAVERILRAFGYRKEDLRYQKTRQVGLSAWLKPKGT

SEQ ID NO: 2963 - protein, 774 aa, synthetic construct
MILDTDMITEDGKPVMRIFKKENGEFKIEYDRTFEPYFYALLKDDSAIEEVKKITAERHGTVVTVKRVEKVQKKFLGRPVEVWKLYFTHPQDRPAIRDKIREHPAVIDIYEYDIPFAKRYLIDKGLVPMEGDEELKMLAFDIETLYHEGEEFAEGPILMISYADEEGARVITWKNVDLPYVDVVSTEREMIKRFLRVVKEKDPDVLITYNGDNFDFAYLKKRCEKLGINFALGRDGSEPKIQRMGDRFAVEVKGRIHFDLYPVIRRTINLPTYTLEAVYEAVFGQPKEKVYAEEITTAWETGENLERVARYSMEDAKVTYELGKEFLPMEAQLSRLIGQSLWDVSRSSTGNLVEWFLLRKAYERNELAPNKPDEKELARRRQSYEGGYVKEPERGLWENIVYLDFRSLYPSIIITHNVSPDTLNREGCKEYDVAPQVGHRFCKDFPGFIPSLLGDLLEERQKIKKKMKATIDPIERKLLDYRQRAIKILANSYYGYYGYARARWYCKECAESVTAWGREYITMTIKEIEEKYGFKVIYSDTDGFFATIPGADAETVKKKAMEFLKYINAKLPGALELEYEGFYKRGFFVTKKKYAVIDEEGKITTRGLEIVRRDWSEIAKETQARVLEALLKDGDVEKAVRIVKEVTEKLSKYEVPPEKLVIHEQITRDLKDYKATGPHVAVAKRLAARGVKIRPGTVISYIVLKGSGRIGDRAIPFDEFDPTKHKYDAEYYIENQVLPAVERILRAFGYRKEDLRYQKTRQVGLSAWLKPKGT

SEQ ID NO: 2964 - protein, 774 aa, synthetic construct
MILDTDMITEDGKPVMRIFKKENGEFKIEYDRTFEPYFYALLKDDSAIEEVKKITAERHGTVVTVKRVEKVQKKFLGRPVEVWKLYFTHPQDRPAIADKIREHPAVIDIYEYDIPFAKRYLIDKGLVPMEGDEELKMLAFDIETLYHEGEEFAEGPILMISYADEEGARVITWKNVDLPYVDVVSTEREMIKRFLRVVKEKDPDVLITYNGDNFDFAYLKKRCEKLGINFALGRDGSEPKIQRMGDRFAVEVKGRIHFDLYPVIRRTINLPTYTLEAVYEAVFGQPKEKVYAEEITTAWETGENLERVARYSMEDAKVTYELGKEFLPMEAQLSRLIGQSLWDVSRSSTGNLVEWFLLRKAYERNELAPNKPDEKELARRRQSYEGGYVKEPERGLWENIVYLDFRSLYPSIIITHNVSPDTLNREGCKEYDVAPQVGHRFCKDFPGFIPSLLGDLLEERQKIKKKMKATIDPIERKLLDYRQRAIKILANSYYGYYGYARARWYCKECAESVTAWGREYITMTIKEIEEKYGFKVIYSDTDGFFATIPGADAETVKKKAMEFLKYINAKLPGALELEYEGFYKRGFFVTKKKYAVIDEEGKITTRGLEIVRRDWSEIAKETQARVLEALLKDGDVEKAVRIVKEVTEKLSKYEVPPEKLVIHEQITRDLKDYKATGPHVAVAKRLAARGVKIRPGTVISYIVLKGSGRIGDRAIPFDEFDPTKHKYDAEYYIENQVLPAVERILRAFGYRKEDLRYQKTRQVGLSAWLKPKGT

SEQ ID NO: 2965 - protein, 774 aa, synthetic construct
MILDTDMITEDGKPVMRIFKKENGEFKIEYDRTFEPYFYALLKDDSAIEEVKKITAERHGTVVTVKRVEKVQKKFLGRPVEVWKLYFTHPQDRPAIADKIREHPAVIDIYEYDIPFAKMYLIDKGLVPMEGDEELKMLAFDIETLYHEGEEFAEGPILMISYADEEGARVITWKNVDLPYVDVVSTEREMIKRFLRVVKEKDPDVLITYNGDNFDFAYLKKRCEKLGINFALGRDGSEPKIQRMGDRFAVEVKGRIHFDLYPVIRRTINLPTYTLEAVYEAVFGQPKEKVYAEEITTAWETGENLERVARYSMEDAKVTYELGKEFLPMEAQLSRLIGQSLWDVSRSSTGNLVEWFLLRKAYERNELAPNKPDEKELARRRQSYEGGYVKEPERGLWENIVYLDFRSLYPSIIITHNVSPDTLNREGCKEYDVAPQVGHRFCKDFPGFIPSLLGDLLEERQKIKKKMKATIDPIERKLLDYRQRAIKILANSYYGYYGYARARWYCKECAESVTAWGREYITMTIKEIEEKYGFKVIYSDTDGFFATIPGADAETVKKKAMEFLKYINAKLPGALELEYEGFYKRGFFVTKKKYAVIDEEGKITTRGLEIVRRDWSEIAKETQARVLEALLKDGDVEKAVRIVKEVTEKLSKYEVPPEKLVIHEQITRDLKDYKATGPHVAVAKRLAARGVKIRPGTVISYIVLKGSGRIGDRAIPFDEFDPTKHKYDAEYYIENQVLPAVERILRAFGYRKEDLRYQKTRQVGLSAWLKPKGT

SEQ ID NO: 2966 - protein, 774 aa, synthetic construct
MILDTDMITEDGKPVMRIFKKENGEFKIEYDRTFEPYFYALLKDDSAIEEVKKITAERHGTVVTVKRVEKVQKKFLGRPVEVWKLYFTHPQDRPAIADKIREHPAVIDIYEYDIPFAKQYLIDKGLVPMEGDEELKMLAFDIETLYHEGEEFAEGPILMISYADEEGARVITWKNVDLPYVDVVSTEREMIKRFLRVVKEKDPDVLITYNGDNFDFAYLKKRCEKLGINFALGRDGSEPKIQRMGDRFAVEVKGRIHFDLYPVIRRTINLPTYTLEAVYEAVFGQPKEKVYAEEITTAWETGENLERVARYSMEDAKVTYELGKEFLPMEAQLSRLIGQSLWDVSRSSTGNLVEWFLLRKAYERNELAPNKPDEKELARRRQSYEGGYVKEPERGLWENIVYLDFRSLYPSIIITHNVSPDTLNREGCKEYDVAPQVGHRFCKDFPGFIPSLLGDLLEERQKIKKKMKATIDPIERKLLDYRQRAIKILANSYYGYYGYARARWYCKECAESVTAWGREYITMTIKEIEEKYGFKVIYSDTDGFFATIPGADAETVKKKAMEFLKYINAKLPGALELEYEGFYKRGFFVTKKKYAVIDEEGKITTRGLEIVRRDWSEIAKETQARVLEALLKDGDVEKAVRIVKEVTEKLSKYEVPPEKLVIHEQITRDLKDYKATGPHVAVAKRLAARGVKIRPGTVISYIVLKGSGRIGDRAIPFDEFDPTKHKYDAEYYIENQVLPAVERILRAFGYRKEDLRYQKTRQVGLSAWLKPKGT

SEQ ID NO: 2967 - protein, 774 aa, synthetic construct
MILDTDMITEDGKPVMRIFKKENGEFKIEYDRTFEPYFYALLKDDSAIEEVKKITAERHGTVVTVKRVEKVQKKFLGRPVEVWKLYFTHPQDRPAIPDKIREHPAVIDIYEYDIPFAKRYLIDKGLVPMEGDEELKMLAFDIETLYHEGEEFAEGPILMISYADEEGARVITWKNVDLPYVDVVSTEREMIKRFLRVVKEKDPDVLITYNGDNFDFAYLKKRCEKLGINFALGRDGSEPKIQRMGDRFAVEVKGRIHFDLYPVIRRTINLPTYTLEAVYEAVFGQPKEKVYAEEITTAWETGENLERVARYSMEDAKVTYELGKEFLPMEAQLSRLIGQSLWDVSRSSTGNLVEWFLLRKAYERNELAPNKPDEKELARRRQSYEGGYVKEPERGLWENIVYLDFRSLYPSIIITHNVSPDTLNREGCKEYDVAPQVGHRFCKDFPGFIPSLLGDLLEERQKIKKKMKATIDPIERKLLDYRQRAIKILANSYYGYYGYARARWYCKECAESVTAWGREYITMTIKEIEEKYGFKVIYSDTDGFFATIPGADAETVKKKAMEFLKYINAKLPGALELEYEGFYKRGFFVTKKKYAVIDEEGKITTRGLEIVRRDWSEIAKETQARVLEALLKDGDVEKAVRIVKEVTEKLSKYEVPPEKLVIHEQITRDLKDYKATGPHVAVAKRLAARGVKIRPGTVISYIVLKGSGRIGDRAIPFDEFDPTKHKYDAEYYIENQVLPAVERILRAFGYRKEDLRYQKTRQVGLSAWLKPKGT

SEQ ID NO: 2968 - protein, 774 aa, synthetic construct
MILDTDMITEDGKPVMRIFKKENGEFKIEYDRTFEPYFYALLKDDSAIEEVKKITAERHGTVVTVKRVEKVQKKFLGRPVEVWKLYFTHPQDRPAIWDKIREHPAVIDIYEYDIPFAKRYLIDKGLVPMEGDEELKMLAFDIETLYHEGEEFAEGPILMISYADEEGARVITWKNVDLPYVDVVSTEREMIKRFLRVVKEKDPDVLITYNGDNFDFAYLKKRCEKLGINFALGRDGSEPKIQRMGDRFAVEVKGRIHFDLYPVIRRTINLPTYTLEAVYEAVFGQPKEKVYAEEITTAWETGENLERVARYSMEDAKVTYELGKEFLPMEAQLSRLIGQSLWDVSRSSTGNLVEWFLLRKAYERNELAPNKPDEKELARRRQSYEGGYVKEPERGLWENIVYLDFRSLYPSIIITHNVSPDTLNREGCKEYDVAPQVGHRFCKDFPGFIPSLLGDLLEERQKIKKKMKATIDPIERKLLDYRQRAIKILANSYYGYYGYARARWYCKECAESVTAWGREYITMTIKEIEEKYGFKVIYSDTDGFFATIPGADAETVKKKAMEFLKYINAKLPGALELEYEGFYKRGFFVTKKKYAVIDEEGKITTRGLEIVRRDWSEIAKETQARVLEALLKDGDVEKAVRIVKEVTEKLSKYEVPPEKLVIHEQITRDLKDYKATGPHVAVAKRLAARGVKIRPGTVISYIVLKGSGRIGDRAIPFDEFDPTKHKYDAEYYIENQVLPAVERILRAFGYRKEDLRYQKTRQVGLSAWLKPKGT

SEQ ID NO: 2969 - protein, 774 aa, synthetic construct
MILDTDMITEDGKPVWRIFKKENGEFKIEYDRTFEPYFYALLKDDSAIEEVKKITAERHGTVVTVKRVEKVQKKFLGRPVEVWKLYFTHPQDVPAIRDKIREHPAVIDIYEYDIPFAKRYLIDKGLVPMEGDEELKMLAFDIETLYHEGEEFAEGPILMISYADEEGARVITWKNVDLPYVDVVSTEREMIKRFLRVVKEKDPDVLITYNGDNFDFAYLKKRCEKLGINFALGRDGSEPKIQRMGDRFAVEVKGRIHFDLYPVIRRTINLPTYTLEAVYEAVFGQPKEKVYAEEITTAWETGENLERVARYSMEDAKVTYELGKEFLPMEAQLSRLIGQSLWDVSRSSTGNLVEWFLLRKAYERNELAPNKPDEKELARRRQSYEGGYVKEPERGLWENIVYLDFRSLYPSIIITHNVSPDTLNREGCKEYDVAPQVGHRFCKDFPGFIPSLLGDLLEERQKIKKKMKATIDPIERKLLDYRQRAIKILANSYYGYYGYARARWYCKECAESVTAWGREYITMTIKEIEEKYGFKVIYSDTDGFFATIPGADAETVKKKAMEFLKYINAKLPGALELEYEGFYKRGFFVTKKKYAVIDEEGKITTRGLEIVRRDWSEIAKETQARVLEALLKDGDVEKAVRIVKEVTEKLSKYEVPPEKLVIHEQITRDLKDYKATGPHVAVAKRLAARGVKIRPGTVISYIVLKGSGRIGDRAIPFDEFDPTKHKYDAEYYIENQVLPAVERILRAFGYRKEDLRYQKTRQVGLSAWLKPKGT

SEQ ID NO: 2970 - protein, 774 aa, synthetic construct
MILDTDMITEDGKPVWRIFKKENGEFKIEYDRTFEAYFYALLKDDSAIEEVKKITAERHGTVVTVKRVEKVQKKFLGRPVEVWKLYFTHPQDVPAIRDKIREHPAVIDIYEYDIPFAKRYLIDKGLVPMEGDEELKMLAFDIETLYHEGEEFAEGPILMISYADEEGARVITWKNVDLPYVDVVSTEREMIKRFLRVVKEKDPDVLITYNGDNFDFAYLKKRCEKLGINFALGRDGSEPKIQRMGDRFAVEVKGRIHFDLYPVIRRTINLPTYTLEAVYEAVFGQPKEKVYAEEITTAWETGENLERVARYSMEDAKVTYELGKEFLPMEAQLSRLIGQSLWDVSRSSTGNLVEWFLLRKAYERNELAPNKPDEKELARRRQSYEGGYVKEPERGLWENIVYLDFRSLYPSIIITHNVSPDTLNREGCKEYDVAPQVGHRFCKDFPGFIPSLLGDLLEERQKIKKKMKATIDPIERKLLDYRQRAIKILANSYYGYYGYARARWYCKECAESVTAWGREYITMTIKEIEEKYGFKVIYSDTDGFFATIPGADAETVKKKAMEFLKYINAKLPGALELEYEGFYKRGFFVTKKKYAVIDEEGKITTRGLEIVRRDWSEIAKETQARVLEALLKDGDVEKAVRIVKEVTEKLSKYEVPPEKLVIHEQITRDLKDYKATGPHVAVAKRLAARGVKIRPGTVISYIVLKGSGRIGDRAIPFDEFDPTKHKYDAEYYIENQVLPAVERILRAFGYRKEDLRYQKTRQVGLSAWLKPKGT

SEQ ID NO: 2971 - protein, 774 aa, synthetic construct
MILDTDMITEDGKPVWRIFKKENGEFKIEYDRTFEAYFYALLKDDSAIEEVKKITAERHGTVVTVKRVEKVQKKFLGRPVEVWKLYFTHPQDIPAIRDKIREHPAVIDIYEYDIPFAKRYLIDKGLVPMEGDEELKMLAFDIETLYHEGEEFAEGPILMISYADEEGARVITWKNVDLPYVDVVSTEREMIKRFLRVVKEKDPDVLITYNGDNFDFAYLKKRCEKLGINFALGRDGSEPKIQRMGDRFAVEVKGRIHFDLYPVIRRTINLPTYTLEAVYEAVFGQPKEKVYAEEITTAWETGENLERVARYSMEDAKVTYELGKEFLPMEAQLSRLIGQSLWDVSRSSTGNLVEWFLLRKAYERNELAPNKPDEKELARRRQSYEGGYVKEPERGLWENIVYLDFRSLYPSIIITHNVSPDTLNREGCKEYDVAPQVGHRFCKDFPGFIPSLLGDLLEERQKIKKKMKATIDPIERKLLDYRQRAIKILANSYYGYYGYARARWYCKECAESVTAWGREYITMTIKEIEEKYGFKVIYSDTDGFFATIPGADAETVKKKAMEFLKYINAKLPGALELEYEGFYKRGFFVTKKKYAVIDEEGKITTRGLEIVRRDWSEIAKETQARVLEALLKDGDVEKAVRIVKEVTEKLSKYEVPPEKLVIHEQITRDLKDYKATGPHVAVAKRLAARGVKIRPGTVISYIVLKGSGRIGDRAIPFDEFDPTKHKYDAEYYIENQVLPAVERILRAFGYRKEDLRYQKTRQVGLSAWLKPKGT

SEQ ID NO: 2972 - protein, 774 aa, synthetic construct
MILDTDMITEDGKPVWRIFKKENGEFKIEYDRTFEAYFYALLKDDSAIEEVKKITAERHGTVVTVKRVEKVQKKFLGRPVEVWKLYFTHPQDIPAIADKIREHPAVIDIYEYDIPFAKRYLIDKGLVPMEGDEELKMLAFDIETLYHEGEEFAEGPILMISYADEEGARVITWKNVDLPYVDVVSTEREMIKRFLRVVKEKDPDVLITYNGDNFDFAYLKKRCEKLGINFALGRDGSEPKIQRMGDRFAVEVKGRIHFDLYPVIRRTINLPTYTLEAVYEAVFGQPKEKVYAEEITTAWETGENLERVARYSMEDAKVTYELGKEFLPMEAQLSRLIGQSLWDVSRSSTGNLVEWFLLRKAYERNELAPNKPDEKELARRRQSYEGGYVKEPERGLWENIVYLDFRSLYPSIIITHNVSPDTLNREGCKEYDVAPQVGHRFCKDFPGFIPSLLGDLLEERQKIKKKMKATIDPIERKLLDYRQRAIKILANSYYGYYGYARARWYCKECAESVTAWGREYITMTIKEIEEKYGFKVIYSDTDGFFATIPGADAETVKKKAMEFLKYINAKLPGALELEYEGFYKRGFFVTKKKYAVIDEEGKITTRGLEIVRRDWSEIAKETQARVLEALLKDGDVEKAVRIVKEVTEKLSKYEVPPEKLVIHEQITRDLKDYKATGPHVAVAKRLAARGVKIRPGTVISYIVLKGSGRIGDRAIPFDEFDPTKHKYDAEYYIENQVLPAVERILRAFGYRKEDLRYQKTRQVGLSAWLKPKGT

SEQ ID NO: 2973 - protein, 774 aa, synthetic construct
MILDTDMITEDGKPVWRIFKKENGEFKIEYDRTFEHYFYALLKDDSAIEEVKKITAERHGTVVTVKRVEKVQKKFLGRPVEVWKLYFTHPQDVPAIRDKIREHPAVIDIYEYDIPFAKRYLIDKGLVPMEGDEELKMLAFDIETLYHEGEEFAEGPILMISYADEEGARVITWKNVDLPYVDVVSTEREMIKRFLRVVKEKDPDVLITYNGDNFDFAYLKKRCEKLGINFALGRDGSEPKIQRMGDRFAVEVKGRIHFDLYPVIRRTINLPTYTLEAVYEAVFGQPKEKVYAEEITTAWETGENLERVARYSMEDAKVTYELGKEFLPMEAQLSRLIGQSLWDVSRSSTGNLVEWFLLRKAYERNELAPNKPDEKELARRRQSYEGGYVKEPERGLWENIVYLDFRSLYPSIIITHNVSPDTLNREGCKEYDVAPQVGHRFCKDFPGFIPSLLGDLLEERQKIKKKMKATIDPIERKLLDYRQRAIKILANSYYGYYGYARARWYCKECAESVTAWGREYITMTIKEIEEKYGFKVIYSDTDGFFATIPGADAETVKKKAMEFLKYINAKLPGALELEYEGFYKRGFFVTKKKYAVIDEEGKITTRGLEIVRRDWSEIAKETQARVLEALLKDGDVEKAVRIVKEVTEKLSKYEVPPEKLVIHEQITRDLKDYKATGPHVAVAKRLAARGVKIRPGTVISYIVLKGSGRIGDRAIPFDEFDPTKHKYDAEYYIENQVLPAVERILRAFGYRKEDLRYQKTRQVGLSAWLKPKGT

SEQ ID NO: 2974 - protein, 774 aa, synthetic construct
MILDTDMITEDGKPVWRIFKKENGEFKIEYDRTFEHYFYALLKDDSAIEEVKKITAERHGTVVTVKRVEKVQKKFLGRPVEVWKLYFTHPQDIPAIRDKIREHPAVIDIYEYDIPFAKRYLIDKGLVPMEGDEELKMLAFDIETLYHEGEEFAEGPILMISYADEEGARVITWKNVDLPYVDVVSTEREMIKRFLRVVKEKDPDVLITYNGDNFDFAYLKKRCEKLGINFALGRDGSEPKIQRMGDRFAVEVKGRIHFDLYPVIRRTINLPTYTLEAVYEAVFGQPKEKVYAEEITTAWETGENLERVARYSMEDAKVTYELGKEFLPMEAQLSRLIGQSLWDVSRSSTGNLVEWFLLRKAYERNELAPNKPDEKELARRRQSYEGGYVKEPERGLWENIVYLDFRSLYPSIIITHNVSPDTLNREGCKEYDVAPQVGHRFCKDFPGFIPSLLGDLLEERQKIKKKMKATIDPIERKLLDYRQRAIKILANSYYGYYGYARARWYCKECAESVTAWGREYITMTIKEIEEKYGFKVIYSDTDGFFATIPGADAETVKKKAMEFLKYINAKLPGALELEYEGFYKRGFFVTKKKYAVIDEEGKITTRGLEIVRRDWSEIAKETQARVLEALLKDGDVEKAVRIVKEVTEKLSKYEVPPEKLVIHEQITRDLKDYKATGPHVAVAKRLAARGVKIRPGTVISYIVLKGSGRIGDRAIPFDEFDPTKHKYDAEYYIENQVLPAVERILRAFGYRKEDLRYQKTRQVGLSAWLKPKGT

SEQ ID NO: 2975 - protein, 774 aa, synthetic construct
MILDTDMITEDGKPVWRIFKKENGEFKIEYDRTFEHYFYALLKDDSAIEEVKKITAERHGTVVTVKRVEKVQKKFLGRPVEVWKLYFTHPQDIPAIADKIREHPAVIDIYEYDIPFAKRYLIDKGLVPMEGDEELKMLAFDIETLYHEGEEFAEGPILMISYADEEGARVITWKNVDLPYVDVVSTEREMIKRFLRVVKEKDPDVLITYNGDNFDFAYLKKRCEKLGINFALGRDGSEPKIQRMGDRFAVEVKGRIHFDLYPVIRRTINLPTYTLEAVYEAVFGQPKEKVYAEEITTAWETGENLERVARYSMEDAKVTYELGKEFLPMEAQLSRLIGQSLWDVSRSSTGNLVEWFLLRKAYERNELAPNKPDEKELARRRQSYEGGYVKEPERGLWENIVYLDFRSLYPSIIITHNVSPDTLNREGCKEYDVAPQVGHRFCKDFPGFIPSLLGDLLEERQKIKKKMKATIDPIERKLLDYRQRAIKILANSYYGYYGYARARWYCKECAESVTAWGREYITMTIKEIEEKYGFKVIYSDTDGFFATIPGADAETVKKKAMEFLKYINAKLPGALELEYEGFYKRGFFVTKKKYAVIDEEGKITTRGLEIVRRDWSEIAKETQARVLEALLKDGDVEKAVRIVKEVTEKLSKYEVPPEKLVIHEQITRDLKDYKATGPHVAVAKRLAARGVKIRPGTVISYIVLKGSGRIGDRAIPFDEFDPTKHKYDAEYYIENQVLPAVERILRAFGYRKEDLRYQKTRQVGLSAWLKPKGT

SEQ ID NO: 2976 - protein, 774 aa, synthetic construct
MILDTDMITEDGKPVWRIFKKENGEFKIEYDRTFESYFYALLKDDSAIEEVKKITAERHGTVVTVKRVEKVQKKFLGRPVEVWKLYFTHPQDIPAIRDKIREHPAVIDIYEYDIPFAKRYLIDKGLVPMEGDEELKMLAFDIETLYHEGEEFAEGPILMISYADEEGARVITWKNVDLPYVDVVSTEREMIKRFLRVVKEKDPDVLITYNGDNFDFAYLKKRCEKLGINFALGRDGSEPKIQRMGDRFAVEVKGRIHFDLYPVIRRTINLPTYTLEAVYEAVFGQPKEKVYAEEITTAWETGENLERVARYSMEDAKVTYELGKEFLPMEAQLSRLIGQSLWDVSRSSTGNLVEWFLLRKAYERNELAPNKPDEKELARRRQSYEGGYVKEPERGLWENIVYLDFRSLYPSIIITHNVSPDTLNREGCKEYDVAPQVGHRFCKDFPGFIPSLLGDLLEERQKIKKKMKATIDPIERKLLDYRQRAIKILANSYYGYYGYARARWYCKECAESVTAWGREYITMTIKEIEEKYGFKVIYSDTDGFFATIPGADAETVKKKAMEFLKYINAKLPGALELEYEGFYKRGFFVTKKKYAVIDEEGKITTRGLEIVRRDWSEIAKETQARVLEALLKDGDVEKAVRIVKEVTEKLSKYEVPPEKLVIHEQITRDLKDYKATGPHVAVAKRLAARGVKIRPGTVISYIVLKGSGRIGDRAIPFDEFDPTKHKYDAEYYIENQVLPAVERILRAFGYRKEDLRYQKTRQVGLSAWLKPKGT

SEQ ID NO: 2977 - protein, 774 aa, synthetic construct
MILDTDMITEDGKPVWRIFKKENGEFKIEYDRTFESYFYALLKDDSAIEEVKKITAERHGTVVTVKRVEKVQKKFLGRPVEVWKLYFTHPQDIPAIADKIREHPAVIDIYEYDIPFAKRYLIDKGLVPMEGDEELKMLAFDIETLYHEGEEFAEGPILMISYADEEGARVITWKNVDLPYVDVVSTEREMIKRFLRVVKEKDPDVLITYNGDNFDFAYLKKRCEKLGINFALGRDGSEPKIQRMGDRFAVEVKGRIHFDLYPVIRRTINLPTYTLEAVYEAVFGQPKEKVYAEEITTAWETGENLERVARYSMEDAKVTYELGKEFLPMEAQLSRLIGQSLWDVSRSSTGNLVEWFLLRKAYERNELAPNKPDEKELARRRQSYEGGYVKEPERGLWENIVYLDFRSLYPSIIITHNVSPDTLNREGCKEYDVAPQVGHRFCKDFPGFIPSLLGDLLEERQKIKKKMKATIDPIERKLLDYRQRAIKILANSYYGYYGYARARWYCKECAESVTAWGREYITMTIKEIEEKYGFKVIYSDTDGFFATIPGADAETVKKKAMEFLKYINAKLPGALELEYEGFYKRGFFVTKKKYAVIDEEGKITTRGLEIVRRDWSEIAKETQARVLEALLKDGDVEKAVRIVKEVTEKLSKYEVPPEKLVIHEQITRDLKDYKATGPHVAVAKRLAARGVKIRPGTVISYIVLKGSGRIGDRAIPFDEFDPTKHKYDAEYYIENQVLPAVERILRAFGYRKEDLRYQKTRQVGLSAWLKPKGT

SEQ ID NO: 2978 - protein, 774 aa, synthetic construct
MILDTDMITEDGKPVWRIFKKENGEFKIEYDRTFEPYFYALLKDDSAIEEVKKITAERHGTVVTVKRVEKVQKKFLGRPVEVWKLYFTHFQDIPAIRDKIREHPAVIDIYEYDIPFAKRYLIDKGLVPMEGDEELKMLAFDIETLYHEGEEFAEGPILMISYADEEGARVITWKNVDLPYVDVVSTEREMIKRFLRVVKEKDPDVLITYNGDNFDFAYLKKRCEKLGINFALGRDGSEPKIQRMGDRFAVEVKGRIHFDLYPVIRRTINLPTYTLEAVYEAVFGQPKEKVYAEEITTAWETGENLERVARYSMEDAKVTYELGKEFLPMEAQLSRLIGQSLWDVSRSSTGNLVEWFLLRKAYERNELAPNKPDEKELARRRQSYEGGYVKEPERGLWENIVYLDFRSLYPSIIITHNVSPDTLNREGCKEYDVAPQVGHRFCKDFPGFIPSLLGDLLEERQKIKKKMKATIDPIERKLLDYRQRAIKILANSYYGYYGYARARWYCKECAESVTAWGREYITMTIKEIEEKYGFKVIYSDTDGFFATIPGADAETVKKKAMEFLKYINAKLPGALELEYEGFYKRGFFVTKKKYAVIDEEGKITTRGLEIVRRDWSEIAKETQARVLEALLKDGDVEKAVRIVKEVTEKLSKYEVPPEKLVIHEQITRDLKDYKATGPHVAVAKRLAARGVKIRPGTVISYIVLKGSGRIGDRAIPFDEFDPTKHKYDAEYYIENQVLPAVERILRAFGYRKEDLRYQKTRQVGLSAWLKPKGT

SEQ ID NO: 2979 - protein, 774 aa, synthetic construct
MILDTDMITEDGKPVWRIFKKENGEFKIEYDRTFEPYFYALLKDDSAIEEVKKITAERHGTVVTVKRVEKVQKKFLGRPVEVWKLYFTHFQDIPAIADKIREHPAVIDIYEYDIPFAKRYLIDKGLVPMEGDEELKMLAFDIETLYHEGEEFAEGPILMISYADEEGARVITWKNVDLPYVDVVSTEREMIKRFLRVVKEKDPDVLITYNGDNFDFAYLKKRCEKLGINFALGRDGSEPKIQRMGDRFAVEVKGRIHFDLYPVIRRTINLPTYTLEAVYEAVFGQPKEKVYAEEITTAWETGENLERVARYSMEDAKVTYELGKEFLPMEAQLSRLIGQSLWDVSRSSTGNLVEWFLLRKAYERNELAPNKPDEKELARRRQSYEGGYVKEPERGLWENIVYLDFRSLYPSIIITHNVSPDTLNREGCKEYDVAPQVGHRFCKDFPGFIPSLLGDLLEERQKIKKKMKATIDPIERKLLDYRQRAIKILANSYYGYYGYARARWYCKECAESVTAWGREYITMTIKEIEEKYGFKVIYSDTDGFFATIPGADAETVKKKAMEFLKYINAKLPGALELEYEGFYKRGFFVTKKKYAVIDEEGKITTRGLEIVRRDWSEIAKETQARVLEALLKDGDVEKAVRIVKEVTEKLSKYEVPPEKLVIHEQITRDLKDYKATGPHVAVAKRLAARGVKIRPGTVISYIVLKGSGRIGDRAIPFDEFDPTKHKYDAEYYIENQVLPAVERILRAFGYRKEDLRYQKTRQVGLSAWLKPKGT

SEQ ID NO: 2980 - protein, 774 aa, synthetic construct
MILDTDMITEDGKPVWRIFKKENGEFKIEYDRTFEPYFYALLKDDSAIEEVKKITAERHGTVVTVKRVEKVQKKFLGRPVEVWKLYFTHIQDVPAIRDKIREHPAVIDIYEYDIPFAKRYLIDKGLVPMEGDEELKMLAFDIETLYHEGEEFAEGPILMISYADEEGARVITWKNVDLPYVDVVSTEREMIKRFLRVVKEKDPDVLITYNGDNFDFAYLKKRCEKLGINFALGRDGSEPKIQRMGDRFAVEVKGRIHFDLYPVIRRTINLPTYTLEAVYEAVFGQPKEKVYAEEITTAWETGENLERVARYSMEDAKVTYELGKEFLPMEAQLSRLIGQSLWDVSRSSTGNLVEWFLLRKAYERNELAPNKPDEKELARRRQSYEGGYVKEPERGLWENIVYLDFRSLYPSIIITHNVSPDTLNREGCKEYDVAPQVGHRFCKDFPGFIPSLLGDLLEERQKIKKKMKATIDPIERKLLDYRQRAIKILANSYYGYYGYARARWYCKECAESVTAWGREYITMTIKEIEEKYGFKVIYSDTDGFFATIPGADAETVKKKAMEFLKYINAKLPGALELEYEGFYKRGFFVTKKKYAVIDEEGKITTRGLEIVRRDWSEIAKETQARVLEALLKDGDVEKAVRIVKEVTEKLSKYEVPPEKLVIHEQITRDLKDYKATGPHVAVAKRLAARGVKIRPGTVISYIVLKGSGRIGDRAIPFDEFDPTKHKYDAEYYIENQVLPAVERILRAFGYRKEDLRYQKTRQVGLSAWLKPKGT

SEQ ID NO: 2981 - protein, 774 aa, synthetic construct
MILDTDMITEDGKPVWRIFKKENGEFKIEYDRTFEPYFYALLKDDSAIEEVKKITAERHGTVVTVKRVEKVQKKFLGRPVEVWKLYFTHIQDIPAIRDKIREHPAVIDIYEYDIPFAKRYLIDKGLVPMEGDEELKMLAFDIETLYHEGEEFAEGPILMISYADEEGARVITWKNVDLPYVDVVSTEREMIKRFLRVVKEKDPDVLITYNGDNFDFAYLKKRCEKLGINFALGRDGSEPKIQRMGDRFAVEVKGRIHFDLYPVIRRTINLPTYTLEAVYEAVFGQPKEKVYAEEITTAWETGENLERVARYSMEDAKVTYELGKEFLPMEAQLSRLIGQSLWDVSRSSTGNLVEWFLLRKAYERNELAPNKPDEKELARRRQSYEGGYVKEPERGLWENIVYLDFRSLYPSIIITHNVSPDTLNREGCKEYDVAPQVGHRFCKDFPGFIPSLLGDLLEERQKIKKKMKATIDPIERKLLDYRQRAIKILANSYYGYYGYARARWYCKECAESVTAWGREYITMTIKEIEEKYGFKVIYSDTDGFFATIPGADAETVKKKAMEFLKYINAKLPGALELEYEGFYKRGFFVTKKKYAVIDEEGKITTRGLEIVRRDWSEIAKETQARVLEALLKDGDVEKAVRIVKEVTEKLSKYEVPPEKLVIHEQITRDLKDYKATGPHVAVAKRLAARGVKIRPGTVISYIVLKGSGRIGDRAIPFDEFDPTKHKYDAEYYIENQVLPAVERILRAFGYRKEDLRYQKTRQVGLSAWLKPKGT

SEQ ID NO: 2982 - protein, 774 aa, synthetic construct
MILDTDMITEDGKPVWRIFKKENGEFKIEYDRTFEPYFYALLKDDSAIEEVKKITAERHGTVVTVKRVEKVQKKFLGRPVEVWKLYFTHIQDIPAIADKIREHPAVIDIYEYDIPFAKRYLIDKGLVPMEGDEELKMLAFDIETLYHEGEEFAEGPILMISYADEEGARVITWKNVDLPYVDVVSTEREMIKRFLRVVKEKDPDVLITYNGDNFDFAYLKKRCEKLGINFALGRDGSEPKIQRMGDRFAVEVKGRIHFDLYPVIRRTINLPTYTLEAVYEAVFGQPKEKVYAEEITTAWETGENLERVARYSMEDAKVTYELGKEFLPMEAQLSRLIGQSLWDVSRSSTGNLVEWFLLRKAYERNELAPNKPDEKELARRRQSYEGGYVKEPERGLWENIVYLDFRSLYPSIIITHNVSPDTLNREGCKEYDVAPQVGHRFCKDFPGFIPSLLGDLLEERQKIKKKMKATIDPIERKLLDYRQRAIKILANSYYGYYGYARARWYCKECAESVTAWGREYITMTIKEIEEKYGFKVIYSDTDGFFATIPGADAETVKKKAMEFLKYINAKLPGALELEYEGFYKRGFFVTKKKYAVIDEEGKITTRGLEIVRRDWSEIAKETQARVLEALLKDGDVEKAVRIVKEVTEKLSKYEVPPEKLVIHEQITRDLKDYKATGPHVAVAKRLAARGVKIRPGTVISYIVLKGSGRIGDRAIPFDEFDPTKHKYDAEYYIENQVLPAVERILRAFGYRKEDLRYQKTRQVGLSAWLKPKGT

SEQ ID NO: 2983 - protein, 774 aa, synthetic construct
MILDTDMITEDGKPVWRIFKKENGEFKIEYDRTFEPYFYALLKDDSAIEEVKKITAERHGTVVTVKRVEKVQKKFLGRPVEVWKLYFTHWQDVPAIRDKIREHPAVIDIYEYDIPFAKRYLIDKGLVPMEGDEELKMLAFDIETLYHEGEEFAEGPILMISYADEEGARVITWKNVDLPYVDVVSTEREMIKRFLRVVKEKDPDVLITYNGDNFDFAYLKKRCEKLGINFALGRDGSEPKIQRMGDRFAVEVKGRIHFDLYPVIRRTINLPTYTLEAVYEAVFGQPKEKVYAEEITTAWETGENLERVARYSMEDAKVTYELGKEFLPMEAQLSRLIGQSLWDVSRSSTGNLVEWFLLRKAYERNELAPNKPDEKELARRRQSYEGGYVKEPERGLWENIVYLDFRSLYPSIIITHNVSPDTLNREGCKEYDVAPQVGHRFCKDFPGFIPSLLGDLLEERQKIKKKMKATIDPIERKLLDYRQRAIKILANSYYGYYGYARARWYCKECAESVTAWGREYITMTIKEIEEKYGFKVIYSDTDGFFATIPGADAETVKKKAMEFLKYINAKLPGALELEYEGFYKRGFFVTKKKYAVIDEEGKITTRGLEIVRRDWSEIAKETQARVLEALLKDGDVEKAVRIVKEVTEKLSKYEVPPEKLVIHEQITRDLKDYKATGPHVAVAKRLAARGVKIRPGTVISYIVLKGSGRIGDRAIPFDEFDPTKHKYDAEYYIENQVLPAVERILRAFGYRKEDLRYQKTRQVGLSAWLKPKGT

SEQ ID NO: 2984 - protein, 774 aa, synthetic construct
MILDTDMITEDGKPVWRIFKKENGEFKIEYDRTFEPYFYALLKDDSAIEEVKKITAERHGTVVTVKRVEKVQKKFLGRPVEVWKLYFTHWQDIPAIRDKIREHPAVIDIYEYDIPFAKRYLIDKGLVPMEGDEELKMLAFDIETLYHEGEEFAEGPILMISYADEEGARVITWKNVDLPYVDVVSTEREMIKRFLRVVKEKDPDVLITYNGDNFDFAYLKKRCEKLGINFALGRDGSEPKIQRMGDRFAVEVKGRIHFDLYPVIRRTINLPTYTLEAVYEAVFGQPKEKVYAEEITTAWETGENLERVARYSMEDAKVTYELGKEFLPMEAQLSRLIGQSLWDVSRSSTGNLVEWFLLRKAYERNELAPNKPDEKELARRRQSYEGGYVKEPERGLWENIVYLDFRSLYPSIIITHNVSPDTLNREGCKEYDVAPQVGHRFCKDFPGFIPSLLGDLLEERQKIKKKMKATIDPIERKLLDYRQRAIKILANSYYGYYGYARARWYCKECAESVTAWGREYITMTIKEIEEKYGFKVIYSDTDGFFATIPGADAETVKKKAMEFLKYINAKLPGALELEYEGFYKRGFFVTKKKYAVIDEEGKITTRGLEIVRRDWSEIAKETQARVLEALLKDGDVEKAVRIVKEVTEKLSKYEVPPEKLVIHEQITRDLKDYKATGPHVAVAKRLAARGVKIRPGTVISYIVLKGSGRIGDRAIPFDEFDPTKHKYDAEYYIENQVLPAVERILRAFGYRKEDLRYQKTRQVGLSAWLKPKGT

SEQ ID NO: 2985 - protein, 774 aa, synthetic construct
MILDTDMITEDGKPVWRIFKKENGEFKIEYDRTFEPYFYALLKDDSAIEEVKKITAERHGTVVTVKRVEKVQKKFLGRPVEVWKLYFTHWQDIPAIFDKIREHPAVIDIYEYDIPFAKRYLIDKGLVPMEGDEELKMLAFDIETLYHEGEEFAEGPILMISYADEEGARVITWKNVDLPYVDVVSTEREMIKRFLRVVKEKDPDVLITYNGDNFDFAYLKKRCEKLGINFALGRDGSEPKIQRMGDRFAVEVKGRIHFDLYPVIRRTINLPTYTLEAVYEAVFGQPKEKVYAEEITTAWETGENLERVARYSMEDAKVTYELGKEFLPMEAQLSRLIGQSLWDVSRSSTGNLVEWFLLRKAYERNELAPNKPDEKELARRRQSYEGGYVKEPERGLWENIVYLDFRSLYPSIIITHNVSPDTLNREGCKEYDVAPQVGHRFCKDFPGFIPSLLGDLLEERQKIKKKMKATIDPIERKLLDYRQRAIKILANSYYGYYGYARARWYCKECAESVTAWGREYITMTIKEIEEKYGFKVIYSDTDGFFATIPGADAETVKKKAMEFLKYINAKLPGALELEYEGFYKRGFFVTKKKYAVIDEEGKITTRGLEIVRRDWSEIAKETQARVLEALLKDGDVEKAVRIVKEVTEKLSKYEVPPEKLVIHEQITRDLKDYKATGPHVAVAKRLAARGVKIRPGTVISYIVLKGSGRIGDRAIPFDEFDPTKHKYDAEYYIENQVLPAVERILRAFGYRKEDLRYQKTRQVGLSAWLKPKGT

SEQ ID NO: 2986 - protein, 774 aa, synthetic construct
MILDTDMITEDGKPVWRIFKKENGEFKIEYDRTFEPYFYALLKDDSAIEEVKKITAERHGTVVTVKRVEKVQKKFLGRPVEVWKLYFTHYQDVPAIRDKIREHPAVIDIYEYDIPFAKRYLIDKGLVPMEGDEELKMLAFDIETLYHEGEEFAEGPILMISYADEEGARVITWKNVDLPYVDVVSTEREMIKRFLRVVKEKDPDVLITYNGDNFDFAYLKKRCEKLGINFALGRDGSEPKIQRMGDRFAVEVKGRIHFDLYPVIRRTINLPTYTLEAVYEAVFGQPKEKVYAEEITTAWETGENLERVARYSMEDAKVTYELGKEFLPMEAQLSRLIGQSLWDVSRSSTGNLVEWFLLRKAYERNELAPNKPDEKELARRRQSYEGGYVKEPERGLWENIVYLDFRSLYPSIIITHNVSPDTLNREGCKEYDVAPQVGHRFCKDFPGFIPSLLGDLLEERQKIKKKMKATIDPIERKLLDYRQRAIKILANSYYGYYGYARARWYCKECAESVTAWGREYITMTIKEIEEKYGFKVIYSDTDGFFATIPGADAETVKKKAMEFLKYINAKLPGALELEYEGFYKRGFFVTKKKYAVIDEEGKITTRGLEIVRRDWSEIAKETQARVLEALLKDGDVEKAVRIVKEVTEKLSKYEVPPEKLVIHEQITRDLKDYKATGPHVAVAKRLAARGVKIRPGTVISYIVLKGSGRIGDRAIPFDEFDPTKHKYDAEYYIENQVLPAVERILRAFGYRKEDLRYQKTRQVGLSAWLKPKGT

SEQ ID NO: 2987 - protein, 774 aa, synthetic construct
MILDTDMITEDGKPVWRIFKKENGEFKIEYDRTFEPYFYALLKDDSAIEEVKKITAERHGTVVTVKRVEKVQKKFLGRPVEVWKLYFTHYQDVPAIADKIREHPAVIDIYEYDIPFAKRYLIDKGLVPMEGDEELKMLAFDIETLYHEGEEFAEGPILMISYADEEGARVITWKNVDLPYVDVVSTEREMIKRFLRVVKEKDPDVLITYNGDNFDFAYLKKRCEKLGINFALGRDGSEPKIQRMGDRFAVEVKGRIHFDLYPVIRRTINLPTYTLEAVYEAVFGQPKEKVYAEEITTAWETGENLERVARYSMEDAKVTYELGKEFLPMEAQLSRLIGQSLWDVSRSSTGNLVEWFLLRKAYERNELAPNKPDEKELARRRQSYEGGYVKEPERGLWENIVYLDFRSLYPSIIITHNVSPDTLNREGCKEYDVAPQVGHRFCKDFPGFIPSLLGDLLEERQKIKKKMKATIDPIERKLLDYRQRAIKILANSYYGYYGYARARWYCKECAESVTAWGREYITMTIKEIEEKYGFKVIYSDTDGFFATIPGADAETVKKKAMEFLKYINAKLPGALELEYEGFYKRGFFVTKKKYAVIDEEGKITTRGLEIVRRDWSEIAKETQARVLEALLKDGDVEKAVRIVKEVTEKLSKYEVPPEKLVIHEQITRDLKDYKATGPHVAVAKRLAARGVKIRPGTVISYIVLKGSGRIGDRAIPFDEFDPTKHKYDAEYYIENQVLPAVERILRAFGYRKEDLRYQKTRQVGLSAWLKPKGT

SEQ ID NO: 2988 - protein, 774 aa, synthetic construct
MILDTDMITEDGKPVWRIFKKENGEFKIEYDRTFEPYFYALLKDDSAIEEVKKITAERHGTVVTVKRVEKVQKKFLGRPVEVWKLYFTHYQDIPAIRDKIREHPAVIDIYEYDIPFAKRYLIDKGLVPMEGDEELKMLAFDIETLYHEGEEFAEGPILMISYADEEGARVITWKNVDLPYVDVVSTEREMIKRFLRVVKEKDPDVLITYNGDNFDFAYLKKRCEKLGINFALGRDGSEPKIQRMGDRFAVEVKGRIHFDLYPVIRRTINLPTYTLEAVYEAVFGQPKEKVYAEEITTAWETGENLERVARYSMEDAKVTYELGKEFLPMEAQLSRLIGQSLWDVSRSSTGNLVEWFLLRKAYERNELAPNKPDEKELARRRQSYEGGYVKEPERGLWENIVYLDFRSLYPSIIITHNVSPDTLNREGCKEYDVAPQVGHRFCKDFPGFIPSLLGDLLEERQKIKKKMKATIDPIERKLLDYRQRAIKILANSYYGYYGYARARWYCKECAESVTAWGREYITMTIKEIEEKYGFKVIYSDTDGFFATIPGADAETVKKKAMEFLKYINAKLPGALELEYEGFYKRGFFVTKKKYAVIDEEGKITTRGLEIVRRDWSEIAKETQARVLEALLKDGDVEKAVRIVKEVTEKLSKYEVPPEKLVIHEQITRDLKDYKATGPHVAVAKRLAARGVKIRPGTVISYIVLKGSGRIGDRAIPFDEFDPTKHKYDAEYYIENQVLPAVERILRAFGYRKEDLRYQKTRQVGLSAWLKPKGT

SEQ ID NO: 2989 - protein, 774 aa, synthetic construct
MILDTDMITEDGKPVWRIFKKENGEFKIEYDRTFEPYFYALLKDDSAIEEVKKITAERHGTVVTVKRVEKVQKKFLGRPVEVWKLYFTHPQDVPAIADKIREHPAVIDIYEYDIPFAKRYLIDKGLVPMEGDEELKMLAFDIETLYHEGEEFAEGPILMISYADEEGARVITWKNVDLPYVDVVSTEREMIKRFLRVVKEKDPDVLITYNGDNFDFAYLKKRCEKLGINFALGRDGSEPKIQRMGDRFAVEVKGRIHFDLYPVIRRTINLPTYTLEAVYEAVFGQPKEKVYAEEITTAWETGENLERVARYSMEDAKVTYELGKEFLPMEAQLSRLIGQSLWDVSRSSTGNLVEWFLLRKAYERNELAPNKPDEKELARRRQSYEGGYVKEPERGLWENIVYLDFRSLYPSIIITHNVSPDTLNREGCKEYDVAPQVGHRFCKDFPGFIPSLLGDLLEERQKIKKKMKATIDPIERKLLDYRQRAIKILANSYYGYYGYARARWYCKECAESVTAWGREYITMTIKEIEEKYGFKVIYSDTDGFFATIPGADAETVKKKAMEFLKYINAKLPGALELEYEGFYKRGFFVTKKKYAVIDEEGKITTRGLEIVRRDWSEIAKETQARVLEALLKDGDVEKAVRIVKEVTEKLSKYEVPPEKLVIHEQITRDLKDYKATGPHVAVAKRLAARGVKIRPGTVISYIVLKGSGRIGDRAIPFDEFDPTKHKYDAEYYIENQVLPAVERILRAFGYRKEDLRYQKTRQVGLSAWLKPKGT

SEQ ID NO: 2990 - protein, 774 aa, synthetic construct
MILDTDMITEDGKPVWRIFKKENGEFKIEYDRTFEPYFYALLKDDSAIEEVKKITAERHGTVVTVKRVEKVQKKFLGRPVEVWKLYFTHPQDVPAIFDKIREHPAVIDIYEYDIPFAKRYLIDKGLVPMEGDEELKMLAFDIETLYHEGEEFAEGPILMISYADEEGARVITWKNVDLPYVDVVSTEREMIKRFLRVVKEKDPDVLITYNGDNFDFAYLKKRCEKLGINFALGRDGSEPKIQRMGDRFAVEVKGRIHFDLYPVIRRTINLPTYTLEAVYEAVFGQPKEKVYAEEITTAWETGENLERVARYSMEDAKVTYELGKEFLPMEAQLSRLIGQSLWDVSRSSTGNLVEWFLLRKAYERNELAPNKPDEKELARRRQSYEGGYVKEPERGLWENIVYLDFRSLYPSIIITHNVSPDTLNREGCKEYDVAPQVGHRFCKDFPGFIPSLLGDLLEERQKIKKKMKATIDPIERKLLDYRQRAIKILANSYYGYYGYARARWYCKECAESVTAWGREYITMTIKEIEEKYGFKVIYSDTDGFFATIPGADAETVKKKAMEFLKYINAKLPGALELEYEGFYKRGFFVTKKKYAVIDEEGKITTRGLEIVRRDWSEIAKETQARVLEALLKDGDVEKAVRIVKEVTEKLSKYEVPPEKLVIHEQITRDLKDYKATGPHVAVAKRLAARGVKIRPGTVISYIVLKGSGRIGDRAIPFDEFDPTKHKYDAEYYIENQVLPAVERILRAFGYRKEDLRYQKTRQVGLSAWLKPKGT

SEQ ID NO: 2991 - protein, 774 aa, synthetic construct
MILDTDMITEDGKPVWRIFKKENGEFKIEYDRTFEPYFYALLKDDSAIEEVKKITAERHGTVVTVKRVEKVQKKFLGRPVEVWKLYFTHPQDVPAIHDKIREHPAVIDIYEYDIPFAKRYLIDKGLVPMEGDEELKMLAFDIETLYHEGEEFAEGPILMISYADEEGARVITWKNVDLPYVDVVSTEREMIKRFLRVVKEKDPDVLITYNGDNFDFAYLKKRCEKLGINFALGRDGSEPKIQRMGDRFAVEVKGRIHFDLYPVIRRTINLPTYTLEAVYEAVFGQPKEKVYAEEITTAWETGENLERVARYSMEDAKVTYELGKEFLPMEAQLSRLIGQSLWDVSRSSTGNLVEWFLLRKAYERNELAPNKPDEKELARRRQSYEGGYVKEPERGLWENIVYLDFRSLYPSIIITHNVSPDTLNREGCKEYDVAPQVGHRFCKDFPGFIPSLLGDLLEERQKIKKKMKATIDPIERKLLDYRQRAIKILANSYYGYYGYARARWYCKECAESVTAWGREYITMTIKEIEEKYGFKVIYSDTDGFFATIPGADAETVKKKAMEFLKYINAKLPGALELEYEGFYKRGFFVTKKKYAVIDEEGKITTRGLEIVRRDWSEIAKETQARVLEALLKDGDVEKAVRIVKEVTEKLSKYEVPPEKLVIHEQITRDLKDYKATGPHVAVAKRLAARGVKIRPGTVISYIVLKGSGRIGDRAIPFDEFDPTKHKYDAEYYIENQVLPAVERILRAFGYRKEDLRYQKTRQVGLSAWLKPKGT

SEQ ID NO: 2992 - protein, 774 aa, synthetic construct
MILDTDMITEDGKPVWRIFKKENGEFKIEYDRTFEPYFYALLKDDSAIEEVKKITAERHGTVVTVKRVEKVQKKFLGRPVEVWKLYFTHPQDVPAIWDKIREHPAVIDIYEYDIPFAKRYLIDKGLVPMEGDEELKMLAFDIETLYHEGEEFAEGPILMISYADEEGARVITWKNVDLPYVDVVSTEREMIKRFLRVVKEKDPDVLITYNGDNFDFAYLKKRCEKLGINFALGRDGSEPKIQRMGDRFAVEVKGRIHFDLYPVIRRTINLPTYTLEAVYEAVFGQPKEKVYAEEITTAWETGENLERVARYSMEDAKVTYELGKEFLPMEAQLSRLIGQSLWDVSRSSTGNLVEWFLLRKAYERNELAPNKPDEKELARRRQSYEGGYVKEPERGLWENIVYLDFRSLYPSIIITHNVSPDTLNREGCKEYDVAPQVGHRFCKDFPGFIPSLLGDLLEERQKIKKKMKATIDPIERKLLDYRQRAIKILANSYYGYYGYARARWYCKECAESVTAWGREYITMTIKEIEEKYGFKVIYSDTDGFFATIPGADAETVKKKAMEFLKYINAKLPGALELEYEGFYKRGFFVTKKKYAVIDEEGKITTRGLEIVRRDWSEIAKETQARVLEALLKDGDVEKAVRIVKEVTEKLSKYEVPPEKLVIHEQITRDLKDYKATGPHVAVAKRLAARGVKIRPGTVISYIVLKGSGRIGDRAIPFDEFDPTKHKYDAEYYIENQVLPAVERILRAFGYRKEDLRYQKTRQVGLSAWLKPKGT

SEQ ID NO: 2993 - protein, 774 aa, synthetic construct
MILDTDMITEDGKPVWRIFKKENGEFKIEYDRTFEPYFYALLKDDSAIEEVKKITAERHGTVVTVKRVEKVQKKFLGRPVEVWKLYFTHPQDIPAIRDKIREHPAVIDIYEYDIPFAKRYLIDKGLVPMEGDEELKMLAFDIETLYHEGEEFAEGPILMISYADEEGARVITWKNVDLPYVDVVSTEREMIKRFLRVVKEKDPDVLITYNGDNFDFAYLKKRCEKLGINFALGRDGSEPKIQRMGDRFAVEVKGRIHFDLYPVIRRTINLPTYTLEAVYEAVFGQPKEKVYAEEITTAWETGENLERVARYSMEDAKVTYELGKEFLPMEAQLSRLIGQSLWDVSRSSTGNLVEWFLLRKAYERNELAPNKPDEKELARRRQSYEGGYVKEPERGLWENIVYLDFRSLYPSIIITHNVSPDTLNREGCKEYDVAPQVGHRFCKDFPGFIPSLLGDLLEERQKIKKKMKATIDPIERKLLDYRQRAIKILANSYYGYYGYARARWYCKECAESVTAWGREYITMTIKEIEEKYGFKVIYSDTDGFFATIPGADAETVKKKAMEFLKYINAKLPGALELEYEGFYKRGFFVTKKKYAVIDEEGKITTRGLEIVRRDWSEIAKETQARVLEALLKDGDVEKAVRIVKEVTEKLSKYEVPPEKLVIHEQITRDLKDYKATGPHVAVAKRLAARGVKIRPGTVISYIVLKGSGRIGDRAIPFDEFDPTKHKYDAEYYIENQVLPAVERILRAFGYRKEDLRYQKTRQVGLSAWLKPKGT

SEQ ID NO: 2994 - protein, 774 aa, synthetic construct
MILDTDMITEDGKPVWRIFKKENGEFKIEYDRTFEPYFYALLKDDSAIEEVKKITAERHGTVVTVKRVEKVQKKFLGRPVEVWKLYFTHPQDIPAIADKIREHPAVIDIYEYDIPFAKRYLIDKGLVPMEGDEELKMLAFDIETLYHEGEEFAEGPILMISYADEEGARVITWKNVDLPYVDVVSTEREMIKRFLRVVKEKDPDVLITYNGDNFDFAYLKKRCEKLGINFALGRDGSEPKIQRMGDRFAVEVKGRIHFDLYPVIRRTINLPTYTLEAVYEAVFGQPKEKVYAEEITTAWETGENLERVARYSMEDAKVTYELGKEFLPMEAQLSRLIGQSLWDVSRSSTGNLVEWFLLRKAYERNELAPNKPDEKELARRRQSYEGGYVKEPERGLWENIVYLDFRSLYPSIIITHNVSPDTLNREGCKEYDVAPQVGHRFCKDFPGFIPSLLGDLLEERQKIKKKMKATIDPIERKLLDYRQRAIKILANSYYGYYGYARARWYCKECAESVTAWGREYITMTIKEIEEKYGFKVIYSDTDGFFATIPGADAETVKKKAMEFLKYINAKLPGALELEYEGFYKRGFFVTKKKYAVIDEEGKITTRGLEIVRRDWSEIAKETQARVLEALLKDGDVEKAVRIVKEVTEKLSKYEVPPEKLVIHEQITRDLKDYKATGPHVAVAKRLAARGVKIRPGTVISYIVLKGSGRIGDRAIPFDEFDPTKHKYDAEYYIENQVLPAVERILRAFGYRKEDLRYQKTRQVGLSAWLKPKGT

SEQ ID NO: 2995 - protein, 774 aa, synthetic construct
MILDTDMITEDGKPVWRIFKKENGEFKIEYDRTFEPYFYALLKDDSAIEEVKKITAERHGTVVTVKRVEKVQKKFLGRPVEVWKLYFTHPQDIPAIFDKIREHPAVIDIYEYDIPFAKRYLIDKGLVPMEGDEELKMLAFDIETLYHEGEEFAEGPILMISYADEEGARVITWKNVDLPYVDVVSTEREMIKRFLRVVKEKDPDVLITYNGDNFDFAYLKKRCEKLGINFALGRDGSEPKIQRMGDRFAVEVKGRIHFDLYPVIRRTINLPTYTLEAVYEAVFGQPKEKVYAEEITTAWETGENLERVARYSMEDAKVTYELGKEFLPMEAQLSRLIGQSLWDVSRSSTGNLVEWFLLRKAYERNELAPNKPDEKELARRRQSYEGGYVKEPERGLWENIVYLDFRSLYPSIIITHNVSPDTLNREGCKEYDVAPQVGHRFCKDFPGFIPSLLGDLLEERQKIKKKMKATIDPIERKLLDYRQRAIKILANSYYGYYGYARARWYCKECAESVTAWGREYITMTIKEIEEKYGFKVIYSDTDGFFATIPGADAETVKKKAMEFLKYINAKLPGALELEYEGFYKRGFFVTKKKYAVIDEEGKITTRGLEIVRRDWSEIAKETQARVLEALLKDGDVEKAVRIVKEVTEKLSKYEVPPEKLVIHEQITRDLKDYKATGPHVAVAKRLAARGVKIRPGTVISYIVLKGSGRIGDRAIPFDEFDPTKHKYDAEYYIENQVLPAVERILRAFGYRKEDLRYQKTRQVGLSAWLKPKGT

SEQ ID NO: 2996 - protein, 774 aa, synthetic construct
MILDTDMITEDGKPVWRIFKKENGEFKIEYDRTFEPYFYALLKDDSAIEEVKKITAERHGTVVTVKRVEKVQKKFLGRPVEVWKLYFTHPQDIPAIHDKIREHPAVIDIYEYDIPFAKRYLIDKGLVPMEGDEELKMLAFDIETLYHEGEEFAEGPILMISYADEEGARVITWKNVDLPYVDVVSTEREMIKRFLRVVKEKDPDVLITYNGDNFDFAYLKKRCEKLGINFALGRDGSEPKIQRMGDRFAVEVKGRIHFDLYPVIRRTINLPTYTLEAVYEAVFGQPKEKVYAEEITTAWETGENLERVARYSMEDAKVTYELGKEFLPMEAQLSRLIGQSLWDVSRSSTGNLVEWFLLRKAYERNELAPNKPDEKELARRRQSYEGGYVKEPERGLWENIVYLDFRSLYPSIIITHNVSPDTLNREGCKEYDVAPQVGHRFCKDFPGFIPSLLGDLLEERQKIKKKMKATIDPIERKLLDYRQRAIKILANSYYGYYGYARARWYCKECAESVTAWGREYITMTIKEIEEKYGFKVIYSDTDGFFATIPGADAETVKKKAMEFLKYINAKLPGALELEYEGFYKRGFFVTKKKYAVIDEEGKITTRGLEIVRRDWSEIAKETQARVLEALLKDGDVEKAVRIVKEVTEKLSKYEVPPEKLVIHEQITRDLKDYKATGPHVAVAKRLAARGVKIRPGTVISYIVLKGSGRIGDRAIPFDEFDPTKHKYDAEYYIENQVLPAVERILRAFGYRKEDLRYQKTRQVGLSAWLKPKGT

SEQ ID NO: 2997 - protein, 774 aa, synthetic construct
MILDTDMITEDGKPVWRIFKKENGEFKIEYDRTFEPYFYALLKDDSAIEEVKKITAERHGTVVTVKRVEKVQKKFLGRPVEVWKLYFTHPQDIPAIWDKIREHPAVIDIYEYDIPFAKRYLIDKGLVPMEGDEELKMLAFDIETLYHEGEEFAEGPILMISYADEEGARVITWKNVDLPYVDVVSTEREMIKRFLRVVKEKDPDVLITYNGDNFDFAYLKKRCEKLGINFALGRDGSEPKIQRMGDRFAVEVKGRIHFDLYPVIRRTINLPTYTLEAVYEAVFGQPKEKVYAEEITTAWETGENLERVARYSMEDAKVTYELGKEFLPMEAQLSRLIGQSLWDVSRSSTGNLVEWFLLRKAYERNELAPNKPDEKELARRRQSYEGGYVKEPERGLWENIVYLDFRSLYPSIIITHNVSPDTLNREGCKEYDVAPQVGHRFCKDFPGFIPSLLGDLLEERQKIKKKMKATIDPIERKLLDYRQRAIKILANSYYGYYGYARARWYCKECAESVTAWGREYITMTIKEIEEKYGFKVIYSDTDGFFATIPGADAETVKKKAMEFLKYINAKLPGALELEYEGFYKRGFFVTKKKYAVIDEEGKITTRGLEIVRRDWSEIAKETQARVLEALLKDGDVEKAVRIVKEVTEKLSKYEVPPEKLVIHEQITRDLKDYKATGPHVAVAKRLAARGVKIRPGTVISYIVLKGSGRIGDRAIPFDEFDPTKHKYDAEYYIENQVLPAVERILRAFGYRKEDLRYQKTRQVGLSAWLKPKGT

SEQ ID NO: 2998 - protein, 774 aa, synthetic construct
MILDTDMITEDGKPVWRIFKKENGEFKIEYDRTFEPYFYALLKDDSAIEEVKKITAERHGTVVTVKRVEKVQKKFLGRPVEVWKLYFTHPQDQPAIRDKIREHPAVIDIYEYDIPFAKRYLIDKGLVPMEGDEELKMLAFDIETLYHEGEEFAEGPILMISYADEEGARVITWKNVDLPYVDVVSTEREMIKRFLRVVKEKDPDVLITYNGDNFDFAYLKKRCEKLGINFALGRDGSEPKIQRMGDRFAVEVKGRIHFDLYPVIRRTINLPTYTLEAVYEAVFGQPKEKVYAEEITTAWETGENLERVARYSMEDAKVTYELGKEFLPMEAQLSRLIGQSLWDVSRSSTGNLVEWFLLRKAYERNELAPNKPDEKELARRRQSYEGGYVKEPERGLWENIVYLDFRSLYPSIIITHNVSPDTLNREGCKEYDVAPQVGHRFCKDFPGFIPSLLGDLLEERQKIKKKMKATIDPIERKLLDYRQRAIKILANSYYGYYGYARARWYCKECAESVTAWGREYITMTIKEIEEKYGFKVIYSDTDGFFATIPGADAETVKKKAMEFLKYINAKLPGALELEYEGFYKRGFFVTKKKYAVIDEEGKITTRGLEIVRRDWSEIAKETQARVLEALLKDGDVEKAVRIVKEVTEKLSKYEVPPEKLVIHEQITRDLKDYKATGPHVAVAKRLAARGVKIRPGTVISYIVLKGSGRIGDRAIPFDEFDPTKHKYDAEYYIENQVLPAVERILRAFGYRKEDLRYQKTRQVGLSAWLKPKGT

SEQ ID NO: 2999 - protein, 774 aa, synthetic construct
MILDTDMITEDGKPVWRIFKKENGEFKIEYDRTFEPYFYALLKDDSAIEEVKKITAERHGTVVTVKRVEKVQKKFLGRPVEVWKLYFTHPQDQPAIFDKIREHPAVIDIYEYDIPFAKRYLIDKGLVPMEGDEELKMLAFDIETLYHEGEEFAEGPILMISYADEEGARVITWKNVDLPYVDVVSTEREMIKRFLRVVKEKDPDVLITYNGDNFDFAYLKKRCEKLGINFALGRDGSEPKIQRMGDRFAVEVKGRIHFDLYPVIRRTINLPTYTLEAVYEAVFGQPKEKVYAEEITTAWETGENLERVARYSMEDAKVTYELGKEFLPMEAQLSRLIGQSLWDVSRSSTGNLVEWFLLRKAYERNELAPNKPDEKELARRRQSYEGGYVKEPERGLWENIVYLDFRSLYPSIIITHNVSPDTLNREGCKEYDVAPQVGHRFCKDFPGFIPSLLGDLLEERQKIKKKMKATIDPIERKLLDYRQRAIKILANSYYGYYGYARARWYCKECAESVTAWGREYITMTIKEIEEKYGFKVIYSDTDGFFATIPGADAETVKKKAMEFLKYINAKLPGALELEYEGFYKRGFFVTKKKYAVIDEEGKITTRGLEIVRRDWSEIAKETQARVLEALLKDGDVEKAVRIVKEVTEKLSKYEVPPEKLVIHEQITRDLKDYKATGPHVAVAKRLAARGVKIRPGTVISYIVLKGSGRIGDRAIPFDEFDPTKHKYDAEYYIENQVLPAVERILRAFGYRKEDLRYQKTRQVGLSAWLKPKGT

SEQ ID NO: 3000 - protein, 774 aa, synthetic construct
MILDTDMITEDGKPVWRIFKKENGEFKIEYDRTFEPYFYALLKDDSAIEEVKKITAERHGTVVTVKRVEKVQKKFLGRPVEVWKLYFTHPQDRPAIRDKIREHPAVIDIYEYDIPFAKRYLIDKGLVPMEGDEELKMLAFDIETLYHEGEEFAEGPILMISYADEEGARVITWKNVDLPYVDVVSTEREMIKRFLRVVKEKDPDVLITYNGDNFDFAYLKKRCEKLGINFALGRDGSEPKIQRMGDRFAVEVKGRIHFDLYPVIRRTINLPTYTLEAVYEAVFGQPKEKVYAEEITTAWETGENLERVARYSMEDAKVTYELGKEFLPMEAQLSRLIGQSLWDVSRSSTGNLVEWFLLRKAYERNELAPNKPDEKELARRRQSYEGGYVKEPERGLWENIVYLDFRSLYPSIIITHNVSPDTLNREGCKEYDVAPQVGHRFCKDFPGFIPSLLGDLLEERQKIKKKMKATIDPIERKLLDYRQRAIKILANSYYGYYGYARARWYCKECAESVTAWGREYITMTIKEIEEKYGFKVIYSDTDGFFATIPGADAETVKKKAMEFLKYINAKLPGALELEYEGFYKRGFFVTKKKYAVIDEEGKITTRGLEIVRRDWSEIAKETQARVLEALLKDGDVEKAVRIVKEVTEKLSKYEVPPEKLVIHEQITRDLKDYKATGPHVAVAKRLAARGVKIRPGTVISYIVLKGSGRIGDRAIPFDEFDPTKHKYDAEYYIENQVLPAVERILRAFGYRKEDLRYQKTRQVGLSAWLKPKGT

SEQ ID NO: 3001 - protein, 774 aa, synthetic construct
MILDTDMITEDGKPVWRIFKKENGEFKIEYDRTFEPYFYALLKDDSAIEEVKKITAERHGTVVTVKRVEKVQKKFLGRPVEVWKLYFTHPQDRPAIFDKIREHPAVIDIYEYDIPFAKRYLIDKGLVPMEGDEELKMLAFDIETLYHEGEEFAEGPILMISYADEEGARVITWKNVDLPYVDVVSTEREMIKRFLRVVKEKDPDVLITYNGDNFDFAYLKKRCEKLGINFALGRDGSEPKIQRMGDRFAVEVKGRIHFDLYPVIRRTINLPTYTLEAVYEAVFGQPKEKVYAEEITTAWETGENLERVARYSMEDAKVTYELGKEFLPMEAQLSRLIGQSLWDVSRSSTGNLVEWFLLRKAYERNELAPNKPDEKELARRRQSYEGGYVKEPERGLWENIVYLDFRSLYPSIIITHNVSPDTLNREGCKEYDVAPQVGHRFCKDFPGFIPSLLGDLLEERQKIKKKMKATIDPIERKLLDYRQRAIKILANSYYGYYGYARARWYCKECAESVTAWGREYITMTIKEIEEKYGFKVIYSDTDGFFATIPGADAETVKKKAMEFLKYINAKLPGALELEYEGFYKRGFFVTKKKYAVIDEEGKITTRGLEIVRRDWSEIAKETQARVLEALLKDGDVEKAVRIVKEVTEKLSKYEVPPEKLVIHEQITRDLKDYKATGPHVAVAKRLAARGVKIRPGTVISYIVLKGSGRIGDRAIPFDEFDPTKHKYDAEYYIENQVLPAVERILRAFGYRKEDLRYQKTRQVGLSAWLKPKGT

SEQ ID NO: 3002 - protein, 774 aa, synthetic construct
MILDTDMITEDGKPVIRIFKKENGEFKIEYDRTFEAYFYALLKDDSAIEEVKKITAERHGTVVTVKRVEKVQKKFLGRPVEVWKLYFTHPQDVPAIRDKIREHPAVIDIYEYDIPFAKRYLIDKGLVPMEGDEELKMLAFDIETLYHEGEEFAEGPILMISYADEEGARVITWKNVDLPYVDVVSTEREMIKRFLRVVKEKDPDVLITYNGDNFDFAYLKKRCEKLGINFALGRDGSEPKIQRMGDRFAVEVKGRIHFDLYPVIRRTINLPTYTLEAVYEAVFGQPKEKVYAEEITTAWETGENLERVARYSMEDAKVTYELGKEFLPMEAQLSRLIGQSLWDVSRSSTGNLVEWFLLRKAYERNELAPNKPDEKELARRRQSYEGGYVKEPERGLWENIVYLDFRSLYPSIIITHNVSPDTLNREGCKEYDVAPQVGHRFCKDFPGFIPSLLGDLLEERQKIKKKMKATIDPIERKLLDYRQRAIKILANSYYGYYGYARARWYCKECAESVTAWGREYITMTIKEIEEKYGFKVIYSDTDGFFATIPGADAETVKKKAMEFLKYINAKLPGALELEYEGFYKRGFFVTKKKYAVIDEEGKITTRGLEIVRRDWSEIAKETQARVLEALLKDGDVEKAVRIVKEVTEKLSKYEVPPEKLVIHEQITRDLKDYKATGPHVAVAKRLAARGVKIRPGTVISYIVLKGSGRIGDRAIPFDEFDPTKHKYDAEYYIENQVLPAVERILRAFGYRKEDLRYQKTRQVGLSAWLKPKGT

SEQ ID NO: 3003 - protein, 774 aa, synthetic construct
MILDTDMITEDGKPVIRIFKKENGEFKIEYDRTFEAYFYALLKDDSAIEEVKKITAERHGTVVTVKRVEKVQKKFLGRPVEVWKLYFTHFQDVPAIRDKIREHPAVIDIYEYDIPFAKRYLIDKGLVPMEGDEELKMLAFDIETLYHEGEEFAEGPILMISYADEEGARVITWKNVDLPYVDVVSTEREMIKRFLRVVKEKDPDVLITYNGDNFDFAYLKKRCEKLGINFALGRDGSEPKIQRMGDRFAVEVKGRIHFDLYPVIRRTINLPTYTLEAVYEAVFGQPKEKVYAEEITTAWETGENLERVARYSMEDAKVTYELGKEFLPMEAQLSRLIGQSLWDVSRSSTGNLVEWFLLRKAYERNELAPNKPDEKELARRRQSYEGGYVKEPERGLWENIVYLDFRSLYPSIIITHNVSPDTLNREGCKEYDVAPQVGHRFCKDFPGFIPSLLGDLLEERQKIKKKMKATIDPIERKLLDYRQRAIKILANSYYGYYGYARARWYCKECAESVTAWGREYITMTIKEIEEKYGFKVIYSDTDGFFATIPGADAETVKKKAMEFLKYINAKLPGALELEYEGFYKRGFFVTKKKYAVIDEEGKITTRGLEIVRRDWSEIAKETQARVLEALLKDGDVEKAVRIVKEVTEKLSKYEVPPEKLVIHEQITRDLKDYKATGPHVAVAKRLAARGVKIRPGTVISYIVLKGSGRIGDRAIPFDEFDPTKHKYDAEYYIENQVLPAVERILRAFGYRKEDLRYQKTRQVGLSAWLKPKGT

SEQ ID NO: 3004 - protein, 774 aa, synthetic construct
MILDTDMITEDGKPVIRIFKKENGEFKIEYDRTFEAYFYALLKDDSAIEEVKKITAERHGTVVTVKRVEKVQKKFLGRPVEVWKLYFTHFQDIPAIRDKIREHPAVIDIYEYDIPFAKRYLIDKGLVPMEGDEELKMLAFDIETLYHEGEEFAEGPILMISYADEEGARVITWKNVDLPYVDVVSTEREMIKRFLRVVKEKDPDVLITYNGDNFDFAYLKKRCEKLGINFALGRDGSEPKIQRMGDRFAVEVKGRIHFDLYPVIRRTINLPTYTLEAVYEAVFGQPKEKVYAEEITTAWETGENLERVARYSMEDAKVTYELGKEFLPMEAQLSRLIGQSLWDVSRSSTGNLVEWFLLRKAYERNELAPNKPDEKELARRRQSYEGGYVKEPERGLWENIVYLDFRSLYPSIIITHNVSPDTLNREGCKEYDVAPQVGHRFCKDFPGFIPSLLGDLLEERQKIKKKMKATIDPIERKLLDYRQRAIKILANSYYGYYGYARARWYCKECAESVTAWGREYITMTIKEIEEKYGFKVIYSDTDGFFATIPGADAETVKKKAMEFLKYINAKLPGALELEYEGFYKRGFFVTKKKYAVIDEEGKITTRGLEIVRRDWSEIAKETQARVLEALLKDGDVEKAVRIVKEVTEKLSKYEVPPEKLVIHEQITRDLKDYKATGPHVAVAKRLAARGVKIRPGTVISYIVLKGSGRIGDRAIPFDEFDPTKHKYDAEYYIENQVLPAVERILRAFGYRKEDLRYQKTRQVGLSAWLKPKGT

SEQ ID NO: 3005 - protein, 774 aa, synthetic construct
MILDTDMITEDGKPVIRIFKKENGEFKIEYDRTFEAYFYALLKDDSAIEEVKKITAERHGTVVTVKRVEKVQKKFLGRPVEVWKLYFTHFQDIPAIHDKIREHPAVIDIYEYDIPFAKRYLIDKGLVPMEGDEELKMLAFDIETLYHEGEEFAEGPILMISYADEEGARVITWKNVDLPYVDVVSTEREMIKRFLRVVKEKDPDVLITYNGDNFDFAYLKKRCEKLGINFALGRDGSEPKIQRMGDRFAVEVKGRIHFDLYPVIRRTINLPTYTLEAVYEAVFGQPKEKVYAEEITTAWETGENLERVARYSMEDAKVTYELGKEFLPMEAQLSRLIGQSLWDVSRSSTGNLVEWFLLRKAYERNELAPNKPDEKELARRRQSYEGGYVKEPERGLWENIVYLDFRSLYPSIIITHNVSPDTLNREGCKEYDVAPQVGHRFCKDFPGFIPSLLGDLLEERQKIKKKMKATIDPIERKLLDYRQRAIKILANSYYGYYGYARARWYCKECAESVTAWGREYITMTIKEIEEKYGFKVIYSDTDGFFATIPGADAETVKKKAMEFLKYINAKLPGALELEYEGFYKRGFFVTKKKYAVIDEEGKITTRGLEIVRRDWSEIAKETQARVLEALLKDGDVEKAVRIVKEVTEKLSKYEVPPEKLVIHEQITRDLKDYKATGPHVAVAKRLAARGVKIRPGTVISYIVLKGSGRIGDRAIPFDEFDPTKHKYDAEYYIENQVLPAVERILRAFGYRKEDLRYQKTRQVGLSAWLKPKGT

SEQ ID NO: 3006 - protein, 774 aa, synthetic construct
MILDTDMITEDGKPVIRIFKKENGEFKIEYDRTFEAYFYALLKDDSAIEEVKKITAERHGTVVTVKRVEKVQKKFLGRPVEVWKLYFTHFQDQPAIRDKIREHPAVIDIYEYDIPFAKRYLIDKGLVPMEGDEELKMLAFDIETLYHEGEEFAEGPILMISYADEEGARVITWKNVDLPYVDVVSTEREMIKRFLRVVKEKDPDVLITYNGDNFDFAYLKKRCEKLGINFALGRDGSEPKIQRMGDRFAVEVKGRIHFDLYPVIRRTINLPTYTLEAVYEAVFGQPKEKVYAEEITTAWETGENLERVARYSMEDAKVTYELGKEFLPMEAQLSRLIGQSLWDVSRSSTGNLVEWFLLRKAYERNELAPNKPDEKELARRRQSYEGGYVKEPERGLWENIVYLDFRSLYPSIIITHNVSPDTLNREGCKEYDVAPQVGHRFCKDFPGFIPSLLGDLLEERQKIKKKMKATIDPIERKLLDYRQRAIKILANSYYGYYGYARARWYCKECAESVTAWGREYITMTIKEIEEKYGFKVIYSDTDGFFATIPGADAETVKKKAMEFLKYINAKLPGALELEYEGFYKRGFFVTKKKYAVIDEEGKITTRGLEIVRRDWSEIAKETQARVLEALLKDGDVEKAVRIVKEVTEKLSKYEVPPEKLVIHEQITRDLKDYKATGPHVAVAKRLAARGVKIRPGTVISYIVLKGSGRIGDRAIPFDEFDPTKHKYDAEYYIENQVLPAVERILRAFGYRKEDLRYQKTRQVGLSAWLKPKGT

SEQ ID NO: 3007 - protein, 774 aa, synthetic construct
MILDTDMITEDGKPVIRIFKKENGEFKIEYDRTFEAYFYALLKDDSAIEEVKKITAERHGTVVTVKRVEKVQKKFLGRPVEVWKLYFTHIQDVPAIRDKIREHPAVIDIYEYDIPFAKRYLIDKGLVPMEGDEELKMLAFDIETLYHEGEEFAEGPILMISYADEEGARVITWKNVDLPYVDVVSTEREMIKRFLRVVKEKDPDVLITYNGDNFDFAYLKKRCEKLGINFALGRDGSEPKIQRMGDRFAVEVKGRIHFDLYPVIRRTINLPTYTLEAVYEAVFGQPKEKVYAEEITTAWETGENLERVARYSMEDAKVTYELGKEFLPMEAQLSRLIGQSLWDVSRSSTGNLVEWFLLRKAYERNELAPNKPDEKELARRRQSYEGGYVKEPERGLWENIVYLDFRSLYPSIIITHNVSPDTLNREGCKEYDVAPQVGHRFCKDFPGFIPSLLGDLLEERQKIKKKMKATIDPIERKLLDYRQRAIKILANSYYGYYGYARARWYCKECAESVTAWGREYITMTIKEIEEKYGFKVIYSDTDGFFATIPGADAETVKKKAMEFLKYINAKLPGALELEYEGFYKRGFFVTKKKYAVIDEEGKITTRGLEIVRRDWSEIAKETQARVLEALLKDGDVEKAVRIVKEVTEKLSKYEVPPEKLVIHEQITRDLKDYKATGPHVAVAKRLAARGVKIRPGTVISYIVLKGSGRIGDRAIPFDEFDPTKHKYDAEYYIENQVLPAVERILRAFGYRKEDLRYQKTRQVGLSAWLKPKGT

SEQ ID NO: 3008 - protein, 774 aa, synthetic construct
MILDTDMITEDGKPVIRIFKKENGEFKIEYDRTFEAYFYALLKDDSAIEEVKKITAERHGTVVTVKRVEKVQKKFLGRPVEVWKLYFTHIQDVPAIADKIREHPAVIDIYEYDIPFAKRYLIDKGLVPMEGDEELKMLAFDIETLYHEGEEFAEGPILMISYADEEGARVITWKNVDLPYVDVVSTEREMIKRFLRVVKEKDPDVLITYNGDNFDFAYLKKRCEKLGINFALGRDGSEPKIQRMGDRFAVEVKGRIHFDLYPVIRRTINLPTYTLEAVYEAVFGQPKEKVYAEEITTAWETGENLERVARYSMEDAKVTYELGKEFLPMEAQLSRLIGQSLWDVSRSSTGNLVEWFLLRKAYERNELAPNKPDEKELARRRQSYEGGYVKEPERGLWENIVYLDFRSLYPSIIITHNVSPDTLNREGCKEYDVAPQVGHRFCKDFPGFIPSLLGDLLEERQKIKKKMKATIDPIERKLLDYRQRAIKILANSYYGYYGYARARWYCKECAESVTAWGREYITMTIKEIEEKYGFKVIYSDTDGFFATIPGADAETVKKKAMEFLKYINAKLPGALELEYEGFYKRGFFVTKKKYAVIDEEGKITTRGLEIVRRDWSEIAKETQARVLEALLKDGDVEKAVRIVKEVTEKLSKYEVPPEKLVIHEQITRDLKDYKATGPHVAVAKRLAARGVKIRPGTVISYIVLKGSGRIGDRAIPFDEFDPTKHKYDAEYYIENQVLPAVERILRAFGYRKEDLRYQKTRQVGLSAWLKPKGT

SEQ ID NO: 3009 - protein, 774 aa, synthetic construct
MILDTDMITEDGKPVIRIFKKENGEFKIEYDRTFEAYFYALLKDDSAIEEVKKITAERHGTVVTVKRVEKVQKKFLGRPVEVWKLYFTHIQDIPAIRDKIREHPAVIDIYEYDIPFAKRYLIDKGLVPMEGDEELKMLAFDIETLYHEGEEFAEGPILMISYADEEGARVITWKNVDLPYVDVVSTEREMIKRFLRVVKEKDPDVLITYNGDNFDFAYLKKRCEKLGINFALGRDGSEPKIQRMGDRFAVEVKGRIHFDLYPVIRRTINLPTYTLEAVYEAVFGQPKEKVYAEEITTAWETGENLERVARYSMEDAKVTYELGKEFLPMEAQLSRLIGQSLWDVSRSSTGNLVEWFLLRKAYERNELAPNKPDEKELARRRQSYEGGYVKEPERGLWENIVYLDFRSLYPSIIITHNVSPDTLNREGCKEYDVAPQVGHRFCKDFPGFIPSLLGDLLEERQKIKKKMKATIDPIERKLLDYRQRAIKILANSYYGYYGYARARWYCKECAESVTAWGREYITMTIKEIEEKYGFKVIYSDTDGFFATIPGADAETVKKKAMEFLKYINAKLPGALELEYEGFYKRGFFVTKKKYAVIDEEGKITTRGLEIVRRDWSEIAKETQARVLEALLKDGDVEKAVRIVKEVTEKLSKYEVPPEKLVIHEQITRDLKDYKATGPHVAVAKRLAARGVKIRPGTVISYIVLKGSGRIGDRAIPFDEFDPTKHKYDAEYYIENQVLPAVERILRAFGYRKEDLRYQKTRQVGLSAWLKPKGT

SEQ ID NO: 3010 - protein, 774 aa, synthetic construct
MILDTDMITEDGKPVIRIFKKENGEFKIEYDRTFEAYFYALLKDDSAIEEVKKITAERHGTVVTVKRVEKVQKKFLGRPVEVWKLYFTHIQDIPAIADKIREHPAVIDIYEYDIPFAKRYLIDKGLVPMEGDEELKMLAFDIETLYHEGEEFAEGPILMISYADEEGARVITWKNVDLPYVDVVSTEREMIKRFLRVVKEKDPDVLITYNGDNFDFAYLKKRCEKLGINFALGRDGSEPKIQRMGDRFAVEVKGRIHFDLYPVIRRTINLPTYTLEAVYEAVFGQPKEKVYAEEITTAWETGENLERVARYSMEDAKVTYELGKEFLPMEAQLSRLIGQSLWDVSRSSTGNLVEWFLLRKAYERNELAPNKPDEKELARRRQSYEGGYVKEPERGLWENIVYLDFRSLYPSIIITHNVSPDTLNREGCKEYDVAPQVGHRFCKDFPGFIPSLLGDLLEERQKIKKKMKATIDPIERKLLDYRQRAIKILANSYYGYYGYARARWYCKECAESVTAWGREYITMTIKEIEEKYGFKVIYSDTDGFFATIPGADAETVKKKAMEFLKYINAKLPGALELEYEGFYKRGFFVTKKKYAVIDEEGKITTRGLEIVRRDWSEIAKETQARVLEALLKDGDVEKAVRIVKEVTEKLSKYEVPPEKLVIHEQITRDLKDYKATGPHVAVAKRLAARGVKIRPGTVISYIVLKGSGRIGDRAIPFDEFDPTKHKYDAEYYIENQVLPAVERILRAFGYRKEDLRYQKTRQVGLSAWLKPKGT

SEQ ID NO: 3011 - protein, 774 aa, synthetic construct
MILDTDMITEDGKPVIRIFKKENGEFKIEYDRTFEAYFYALLKDDSAIEEVKKITAERHGTVVTVKRVEKVQKKFLGRPVEVWKLYFTHSQDVPAIRDKIREHPAVIDIYEYDIPFAKRYLIDKGLVPMEGDEELKMLAFDIETLYHEGEEFAEGPILMISYADEEGARVITWKNVDLPYVDVVSTEREMIKRFLRVVKEKDPDVLITYNGDNFDFAYLKKRCEKLGINFALGRDGSEPKIQRMGDRFAVEVKGRIHFDLYPVIRRTINLPTYTLEAVYEAVFGQPKEKVYAEEITTAWETGENLERVARYSMEDAKVTYELGKEFLPMEAQLSRLIGQSLWDVSRSSTGNLVEWFLLRKAYERNELAPNKPDEKELARRRQSYEGGYVKEPERGLWENIVYLDFRSLYPSIIITHNVSPDTLNREGCKEYDVAPQVGHRFCKDFPGFIPSLLGDLLEERQKIKKKMKATIDPIERKLLDYRQRAIKILANSYYGYYGYARARWYCKECAESVTAWGREYITMTIKEIEEKYGFKVIYSDTDGFFATIPGADAETVKKKAMEFLKYINAKLPGALELEYEGFYKRGFFVTKKKYAVIDEEGKITTRGLEIVRRDWSEIAKETQARVLEALLKDGDVEKAVRIVKEVTEKLSKYEVPPEKLVIHEQITRDLKDYKATGPHVAVAKRLAARGVKIRPGTVISYIVLKGSGRIGDRAIPFDEFDPTKHKYDAEYYIENQVLPAVERILRAFGYRKEDLRYQKTRQVGLSAWLKPKGT

SEQ ID NO: 3012 - protein, 774 aa, synthetic construct
MILDTDMITEDGKPVIRIFKKENGEFKIEYDRTFEAYFYALLKDDSAIEEVKKITAERHGTVVTVKRVEKVQKKFLGRPVEVWKLYFTHWQDVPAIRDKIREHPAVIDIYEYDIPFAKRYLIDKGLVPMEGDEELKMLAFDIETLYHEGEEFAEGPILMISYADEEGARVITWKNVDLPYVDVVSTEREMIKRFLRVVKEKDPDVLITYNGDNFDFAYLKKRCEKLGINFALGRDGSEPKIQRMGDRFAVEVKGRIHFDLYPVIRRTINLPTYTLEAVYEAVFGQPKEKVYAEEITTAWETGENLERVARYSMEDAKVTYELGKEFLPMEAQLSRLIGQSLWDVSRSSTGNLVEWFLLRKAYERNELAPNKPDEKELARRRQSYEGGYVKEPERGLWENIVYLDFRSLYPSIIITHNVSPDTLNREGCKEYDVAPQVGHRFCKDFPGFIPSLLGDLLEERQKIKKKMKATIDPIERKLLDYRQRAIKILANSYYGYYGYARARWYCKECAESVTAWGREYITMTIKEIEEKYGFKVIYSDTDGFFATIPGADAETVKKKAMEFLKYINAKLPGALELEYEGFYKRGFFVTKKKYAVIDEEGKITTRGLEIVRRDWSEIAKETQARVLEALLKDGDVEKAVRIVKEVTEKLSKYEVPPEKLVIHEQITRDLKDYKATGPHVAVAKRLAARGVKIRPGTVISYIVLKGSGRIGDRAIPFDEFDPTKHKYDAEYYIENQVLPAVERILRAFGYRKEDLRYQKTRQVGLSAWLKPKGT

SEQ ID NO: 3013 - protein, 774 aa, synthetic construct
MILDTDMITEDGKPVIRIFKKENGEFKIEYDRTFEAYFYALLKDDSAIEEVKKITAERHGTVVTVKRVEKVQKKFLGRPVEVWKLYFTHWQDVPAIWDKIREHPAVIDIYEYDIPFAKRYLIDKGLVPMEGDEELKMLAFDIETLYHEGEEFAEGPILMISYADEEGARVITWKNVDLPYVDVVSTEREMIKRFLRVVKEKDPDVLITYNGDNFDFAYLKKRCEKLGINFALGRDGSEPKIQRMGDRFAVEVKGRIHFDLYPVIRRTINLPTYTLEAVYEAVFGQPKEKVYAEEITTAWETGENLERVARYSMEDAKVTYELGKEFLPMEAQLSRLIGQSLWDVSRSSTGNLVEWFLLRKAYERNELAPNKPDEKELARRRQSYEGGYVKEPERGLWENIVYLDFRSLYPSIIITHNVSPDTLNREGCKEYDVAPQVGHRFCKDFPGFIPSLLGDLLEERQKIKKKMKATIDPIERKLLDYRQRAIKILANSYYGYYGYARARWYCKECAESVTAWGREYITMTIKEIEEKYGFKVIYSDTDGFFATIPGADAETVKKKAMEFLKYINAKLPGALELEYEGFYKRGFFVTKKKYAVIDEEGKITTRGLEIVRRDWSEIAKETQARVLEALLKDGDVEKAVRIVKEVTEKLSKYEVPPEKLVIHEQITRDLKDYKATGPHVAVAKRLAARGVKIRPGTVISYIVLKGSGRIGDRAIPFDEFDPTKHKYDAEYYIENQVLPAVERILRAFGYRKEDLRYQKTRQVGLSAWLKPKGT

SEQ ID NO: 3014 - protein, 774 aa, synthetic construct
MILDTDMITEDGKPVIRIFKKENGEFKIEYDRTFEAYFYALLKDDSAIEEVKKITAERHGTVVTVKRVEKVQKKFLGRPVEVWKLYFTHWQDIPAIRDKIREHPAVIDIYEYDIPFAKRYLIDKGLVPMEGDEELKMLAFDIETLYHEGEEFAEGPILMISYADEEGARVITWKNVDLPYVDVVSTEREMIKRFLRVVKEKDPDVLITYNGDNFDFAYLKKRCEKLGINFALGRDGSEPKIQRMGDRFAVEVKGRIHFDLYPVIRRTINLPTYTLEAVYEAVFGQPKEKVYAEEITTAWETGENLERVARYSMEDAKVTYELGKEFLPMEAQLSRLIGQSLWDVSRSSTGNLVEWFLLRKAYERNELAPNKPDEKELARRRQSYEGGYVKEPERGLWENIVYLDFRSLYPSIIITHNVSPDTLNREGCKEYDVAPQVGHRFCKDFPGFIPSLLGDLLEERQKIKKKMKATIDPIERKLLDYRQRAIKILANSYYGYYGYARARWYCKECAESVTAWGREYITMTIKEIEEKYGFKVIYSDTDGFFATIPGADAETVKKKAMEFLKYINAKLPGALELEYEGFYKRGFFVTKKKYAVIDEEGKITTRGLEIVRRDWSEIAKETQARVLEALLKDGDVEKAVRIVKEVTEKLSKYEVPPEKLVIHEQITRDLKDYKATGPHVAVAKRLAARGVKIRPGTVISYIVLKGSGRIGDRAIPFDEFDPTKHKYDAEYYIENQVLPAVERILRAFGYRKEDLRYQKTRQVGLSAWLKPKGT

SEQ ID NO: 3015 - protein, 774 aa, synthetic construct
MILDTDMITEDGKPVIRIFKKENGEFKIEYDRTFEAYFYALLKDDSAIEEVKKITAERHGTVVTVKRVEKVQKKFLGRPVEVWKLYFTHWQDIPAIADKIREHPAVIDIYEYDIPFAKRYLIDKGLVPMEGDEELKMLAFDIETLYHEGEEFAEGPILMISYADEEGARVITWKNVDLPYVDVVSTEREMIKRFLRVVKEKDPDVLITYNGDNFDFAYLKKRCEKLGINFALGRDGSEPKIQRMGDRFAVEVKGRIHFDLYPVIRRTINLPTYTLEAVYEAVFGQPKEKVYAEEITTAWETGENLERVARYSMEDAKVTYELGKEFLPMEAQLSRLIGQSLWDVSRSSTGNLVEWFLLRKAYERNELAPNKPDEKELARRRQSYEGGYVKEPERGLWENIVYLDFRSLYPSIIITHNVSPDTLNREGCKEYDVAPQVGHRFCKDFPGFIPSLLGDLLEERQKIKKKMKATIDPIERKLLDYRQRAIKILANSYYGYYGYARARWYCKECAESVTAWGREYITMTIKEIEEKYGFKVIYSDTDGFFATIPGADAETVKKKAMEFLKYINAKLPGALELEYEGFYKRGFFVTKKKYAVIDEEGKITTRGLEIVRRDWSEIAKETQARVLEALLKDGDVEKAVRIVKEVTEKLSKYEVPPEKLVIHEQITRDLKDYKATGPHVAVAKRLAARGVKIRPGTVISYIVLKGSGRIGDRAIPFDEFDPTKHKYDAEYYIENQVLPAVERILRAFGYRKEDLRYQKTRQVGLSAWLKPKGT

SEQ ID NO: 3016 - protein, 774 aa, synthetic construct
MILDTDMITEDGKPVIRIFKKENGEFKIEYDRTFEAYFYALLKDDSAIEEVKKITAERHGTVVTVKRVEKVQKKFLGRPVEVWKLYFTHYQDVPAIADKIREHPAVIDIYEYDIPFAKRYLIDKGLVPMEGDEELKMLAFDIETLYHEGEEFAEGPILMISYADEEGARVITWKNVDLPYVDVVSTEREMIKRFLRVVKEKDPDVLITYNGDNFDFAYLKKRCEKLGINFALGRDGSEPKIQRMGDRFAVEVKGRIHFDLYPVIRRTINLPTYTLEAVYEAVFGQPKEKVYAEEITTAWETGENLERVARYSMEDAKVTYELGKEFLPMEAQLSRLIGQSLWDVSRSSTGNLVEWFLLRKAYERNELAPNKPDEKELARRRQSYEGGYVKEPERGLWENIVYLDFRSLYPSIIITHNVSPDTLNREGCKEYDVAPQVGHRFCKDFPGFIPSLLGDLLEERQKIKKKMKATIDPIERKLLDYRQRAIKILANSYYGYYGYARARWYCKECAESVTAWGREYITMTIKEIEEKYGFKVIYSDTDGFFATIPGADAETVKKKAMEFLKYINAKLPGALELEYEGFYKRGFFVTKKKYAVIDEEGKITTRGLEIVRRDWSEIAKETQARVLEALLKDGDVEKAVRIVKEVTEKLSKYEVPPEKLVIHEQITRDLKDYKATGPHVAVAKRLAARGVKIRPGTVISYIVLKGSGRIGDRAIPFDEFDPTKHKYDAEYYIENQVLPAVERILRAFGYRKEDLRYQKTRQVGLSAWLKPKGT

SEQ ID NO: 3017 - protein, 774 aa, synthetic construct
MILDTDMITEDGKPVIRIFKKENGEFKIEYDRTFEAYFYALLKDDSAIEEVKKITAERHGTVVTVKRVEKVQKKFLGRPVEVWKLYFTHYQDIPAIRDKIREHPAVIDIYEYDIPFAKRYLIDKGLVPMEGDEELKMLAFDIETLYHEGEEFAEGPILMISYADEEGARVITWKNVDLPYVDVVSTEREMIKRFLRVVKEKDPDVLITYNGDNFDFAYLKKRCEKLGINFALGRDGSEPKIQRMGDRFAVEVKGRIHFDLYPVIRRTINLPTYTLEAVYEAVFGQPKEKVYAEEITTAWETGENLERVARYSMEDAKVTYELGKEFLPMEAQLSRLIGQSLWDVSRSSTGNLVEWFLLRKAYERNELAPNKPDEKELARRRQSYEGGYVKEPERGLWENIVYLDFRSLYPSIIITHNVSPDTLNREGCKEYDVAPQVGHRFCKDFPGFIPSLLGDLLEERQKIKKKMKATIDPIERKLLDYRQRAIKILANSYYGYYGYARARWYCKECAESVTAWGREYITMTIKEIEEKYGFKVIYSDTDGFFATIPGADAETVKKKAMEFLKYINAKLPGALELEYEGFYKRGFFVTKKKYAVIDEEGKITTRGLEIVRRDWSEIAKETQARVLEALLKDGDVEKAVRIVKEVTEKLSKYEVPPEKLVIHEQITRDLKDYKATGPHVAVAKRLAARGVKIRPGTVISYIVLKGSGRIGDRAIPFDEFDPTKHKYDAEYYIENQVLPAVERILRAFGYRKEDLRYQKTRQVGLSAWLKPKGT

SEQ ID NO: 3018 - protein, 774 aa, synthetic construct
MILDTDMITEDGKPVIRIFKKENGEFKIEYDRTFEAYFYALLKDDSAIEEVKKITAERHGTVVTVKRVEKVQKKFLGRPVEVWKLYFTHYQDIPAIWDKIREHPAVIDIYEYDIPFAKRYLIDKGLVPMEGDEELKMLAFDIETLYHEGEEFAEGPILMISYADEEGARVITWKNVDLPYVDVVSTEREMIKRFLRVVKEKDPDVLITYNGDNFDFAYLKKRCEKLGINFALGRDGSEPKIQRMGDRFAVEVKGRIHFDLYPVIRRTINLPTYTLEAVYEAVFGQPKEKVYAEEITTAWETGENLERVARYSMEDAKVTYELGKEFLPMEAQLSRLIGQSLWDVSRSSTGNLVEWFLLRKAYERNELAPNKPDEKELARRRQSYEGGYVKEPERGLWENIVYLDFRSLYPSIIITHNVSPDTLNREGCKEYDVAPQVGHRFCKDFPGFIPSLLGDLLEERQKIKKKMKATIDPIERKLLDYRQRAIKILANSYYGYYGYARARWYCKECAESVTAWGREYITMTIKEIEEKYGFKVIYSDTDGFFATIPGADAETVKKKAMEFLKYINAKLPGALELEYEGFYKRGFFVTKKKYAVIDEEGKITTRGLEIVRRDWSEIAKETQARVLEALLKDGDVEKAVRIVKEVTEKLSKYEVPPEKLVIHEQITRDLKDYKATGPHVAVAKRLAARGVKIRPGTVISYIVLKGSGRIGDRAIPFDEFDPTKHKYDAEYYIENQVLPAVERILRAFGYRKEDLRYQKTRQVGLSAWLKPKGT

SEQ ID NO: 3019 - protein, 774 aa, synthetic construct
MILDTDMITEDGKPVIRIFKKENGEFKIEYDRTFEAYFYALLKDDSAIEEVKKITAERHGTVVTVKRVEKVQKKFLGRPVEVWKLYFTHPQDVPAIADKIREHPAVIDIYEYDIPFAKRYLIDKGLVPMEGDEELKMLAFDIETLYHEGEEFAEGPILMISYADEEGARVITWKNVDLPYVDVVSTEREMIKRFLRVVKEKDPDVLITYNGDNFDFAYLKKRCEKLGINFALGRDGSEPKIQRMGDRFAVEVKGRIHFDLYPVIRRTINLPTYTLEAVYEAVFGQPKEKVYAEEITTAWETGENLERVARYSMEDAKVTYELGKEFLPMEAQLSRLIGQSLWDVSRSSTGNLVEWFLLRKAYERNELAPNKPDEKELARRRQSYEGGYVKEPERGLWENIVYLDFRSLYPSIIITHNVSPDTLNREGCKEYDVAPQVGHRFCKDFPGFIPSLLGDLLEERQKIKKKMKATIDPIERKLLDYRQRAIKILANSYYGYYGYARARWYCKECAESVTAWGREYITMTIKEIEEKYGFKVIYSDTDGFFATIPGADAETVKKKAMEFLKYINAKLPGALELEYEGFYKRGFFVTKKKYAVIDEEGKITTRGLEIVRRDWSEIAKETQARVLEALLKDGDVEKAVRIVKEVTEKLSKYEVPPEKLVIHEQITRDLKDYKATGPHVAVAKRLAARGVKIRPGTVISYIVLKGSGRIGDRAIPFDEFDPTKHKYDAEYYIENQVLPAVERILRAFGYRKEDLRYQKTRQVGLSAWLKPKGT

SEQ ID NO: 3020 - protein, 774 aa, synthetic construct
MILDTDMITEDGKPVIRIFKKENGEFKIEYDRTFEAYFYALLKDDSAIEEVKKITAERHGTVVTVKRVEKVQKKFLGRPVEVWKLYFTHPQDVPAIFDKIREHPAVIDIYEYDIPFAKRYLIDKGLVPMEGDEELKMLAFDIETLYHEGEEFAEGPILMISYADEEGARVITWKNVDLPYVDVVSTEREMIKRFLRVVKEKDPDVLITYNGDNFDFAYLKKRCEKLGINFALGRDGSEPKIQRMGDRFAVEVKGRIHFDLYPVIRRTINLPTYTLEAVYEAVFGQPKEKVYAEEITTAWETGENLERVARYSMEDAKVTYELGKEFLPMEAQLSRLIGQSLWDVSRSSTGNLVEWFLLRKAYERNELAPNKPDEKELARRRQSYEGGYVKEPERGLWENIVYLDFRSLYPSIIITHNVSPDTLNREGCKEYDVAPQVGHRFCKDFPGFIPSLLGDLLEERQKIKKKMKATIDPIERKLLDYRQRAIKILANSYYGYYGYARARWYCKECAESVTAWGREYITMTIKEIEEKYGFKVIYSDTDGFFATIPGADAETVKKKAMEFLKYINAKLPGALELEYEGFYKRGFFVTKKKYAVIDEEGKITTRGLEIVRRDWSEIAKETQARVLEALLKDGDVEKAVRIVKEVTEKLSKYEVPPEKLVIHEQITRDLKDYKATGPHVAVAKRLAARGVKIRPGTVISYIVLKGSGRIGDRAIPFDEFDPTKHKYDAEYYIENQVLPAVERILRAFGYRKEDLRYQKTRQVGLSAWLKPKGT

SEQ ID NO: 3021 - protein, 774 aa, synthetic construct
MILDTDMITEDGKPVIRIFKKENGEFKIEYDRTFEAYFYALLKDDSAIEEVKKITAERHGTVVTVKRVEKVQKKFLGRPVEVWKLYFTHPQDVPAIHDKIREHPAVIDIYEYDIPFAKRYLIDKGLVPMEGDEELKMLAFDIETLYHEGEEFAEGPILMISYADEEGARVITWKNVDLPYVDVVSTEREMIKRFLRVVKEKDPDVLITYNGDNFDFAYLKKRCEKLGINFALGRDGSEPKIQRMGDRFAVEVKGRIHFDLYPVIRRTINLPTYTLEAVYEAVFGQPKEKVYAEEITTAWETGENLERVARYSMEDAKVTYELGKEFLPMEAQLSRLIGQSLWDVSRSSTGNLVEWFLLRKAYERNELAPNKPDEKELARRRQSYEGGYVKEPERGLWENIVYLDFRSLYPSIIITHNVSPDTLNREGCKEYDVAPQVGHRFCKDFPGFIPSLLGDLLEERQKIKKKMKATIDPIERKLLDYRQRAIKILANSYYGYYGYARARWYCKECAESVTAWGREYITMTIKEIEEKYGFKVIYSDTDGFFATIPGADAETVKKKAMEFLKYINAKLPGALELEYEGFYKRGFFVTKKKYAVIDEEGKITTRGLEIVRRDWSEIAKETQARVLEALLKDGDVEKAVRIVKEVTEKLSKYEVPPEKLVIHEQITRDLKDYKATGPHVAVAKRLAARGVKIRPGTVISYIVLKGSGRIGDRAIPFDEFDPTKHKYDAEYYIENQVLPAVERILRAFGYRKEDLRYQKTRQVGLSAWLKPKGT

SEQ ID NO: 3022 - protein, 774 aa, synthetic construct
MILDTDMITEDGKPVIRIFKKENGEFKIEYDRTFEAYFYALLKDDSAIEEVKKITAERHGTVVTVKRVEKVQKKFLGRPVEVWKLYFTHPQDIPAIRDKIREHPAVIDIYEYDIPFAKRYLIDKGLVPMEGDEELKMLAFDIETLYHEGEEFAEGPILMISYADEEGARVITWKNVDLPYVDVVSTEREMIKRFLRVVKEKDPDVLITYNGDNFDFAYLKKRCEKLGINFALGRDGSEPKIQRMGDRFAVEVKGRIHFDLYPVIRRTINLPTYTLEAVYEAVFGQPKEKVYAEEITTAWETGENLERVARYSMEDAKVTYELGKEFLPMEAQLSRLIGQSLWDVSRSSTGNLVEWFLLRKAYERNELAPNKPDEKELARRRQSYEGGYVKEPERGLWENIVYLDFRSLYPSIIITHNVSPDTLNREGCKEYDVAPQVGHRFCKDFPGFIPSLLGDLLEERQKIKKKMKATIDPIERKLLDYRQRAIKILANSYYGYYGYARARWYCKECAESVTAWGREYITMTIKEIEEKYGFKVIYSDTDGFFATIPGADAETVKKKAMEFLKYINAKLPGALELEYEGFYKRGFFVTKKKYAVIDEEGKITTRGLEIVRRDWSEIAKETQARVLEALLKDGDVEKAVRIVKEVTEKLSKYEVPPEKLVIHEQITRDLKDYKATGPHVAVAKRLAARGVKIRPGTVISYIVLKGSGRIGDRAIPFDEFDPTKHKYDAEYYIENQVLPAVERILRAFGYRKEDLRYQKTRQVGLSAWLKPKGT

SEQ ID NO: 3023 - protein, 774 aa, synthetic construct
MILDTDMITEDGKPVIRIFKKENGEFKIEYDRTFEAYFYALLKDDSAIEEVKKITAERHGTVVTVKRVEKVQKKFLGRPVEVWKLYFTHPQDIPAIHDKIREHPAVIDIYEYDIPFAKRYLIDKGLVPMEGDEELKMLAFDIETLYHEGEEFAEGPILMISYADEEGARVITWKNVDLPYVDVVSTEREMIKRFLRVVKEKDPDVLITYNGDNFDFAYLKKRCEKLGINFALGRDGSEPKIQRMGDRFAVEVKGRIHFDLYPVIRRTINLPTYTLEAVYEAVFGQPKEKVYAEEITTAWETGENLERVARYSMEDAKVTYELGKEFLPMEAQLSRLIGQSLWDVSRSSTGNLVEWFLLRKAYERNELAPNKPDEKELARRRQSYEGGYVKEPERGLWENIVYLDFRSLYPSIIITHNVSPDTLNREGCKEYDVAPQVGHRFCKDFPGFIPSLLGDLLEERQKIKKKMKATIDPIERKLLDYRQRAIKILANSYYGYYGYARARWYCKECAESVTAWGREYITMTIKEIEEKYGFKVIYSDTDGFFATIPGADAETVKKKAMEFLKYINAKLPGALELEYEGFYKRGFFVTKKKYAVIDEEGKITTRGLEIVRRDWSEIAKETQARVLEALLKDGDVEKAVRIVKEVTEKLSKYEVPPEKLVIHEQITRDLKDYKATGPHVAVAKRLAARGVKIRPGTVISYIVLKGSGRIGDRAIPFDEFDPTKHKYDAEYYIENQVLPAVERILRAFGYRKEDLRYQKTRQVGLSAWLKPKGT

SEQ ID NO: 3024 - protein, 774 aa, synthetic construct
MILDTDMITEDGKPVIRIFKKENGEFKIEYDRTFEAYFYALLKDDSAIEEVKKITAERHGTVVTVKRVEKVQKKFLGRPVEVWKLYFTHPQDKPAIRDKIREHPAVIDIYEYDIPFAKRYLIDKGLVPMEGDEELKMLAFDIETLYHEGEEFAEGPILMISYADEEGARVITWKNVDLPYVDVVSTEREMIKRFLRVVKEKDPDVLITYNGDNFDFAYLKKRCEKLGINFALGRDGSEPKIQRMGDRFAVEVKGRIHFDLYPVIRRTINLPTYTLEAVYEAVFGQPKEKVYAEEITTAWETGENLERVARYSMEDAKVTYELGKEFLPMEAQLSRLIGQSLWDVSRSSTGNLVEWFLLRKAYERNELAPNKPDEKELARRRQSYEGGYVKEPERGLWENIVYLDFRSLYPSIIITHNVSPDTLNREGCKEYDVAPQVGHRFCKDFPGFIPSLLGDLLEERQKIKKKMKATIDPIERKLLDYRQRAIKILANSYYGYYGYARARWYCKECAESVTAWGREYITMTIKEIEEKYGFKVIYSDTDGFFATIPGADAETVKKKAMEFLKYINAKLPGALELEYEGFYKRGFFVTKKKYAVIDEEGKITTRGLEIVRRDWSEIAKETQARVLEALLKDGDVEKAVRIVKEVTEKLSKYEVPPEKLVIHEQITRDLKDYKATGPHVAVAKRLAARGVKIRPGTVISYIVLKGSGRIGDRAIPFDEFDPTKHKYDAEYYIENQVLPAVERILRAFGYRKEDLRYQKTRQVGLSAWLKPKGT

SEQ ID NO: 3025 - protein, 774 aa, synthetic construct
MILDTDMITEDGKPVIRIFKKENGEFKIEYDRTFEAYFYALLKDDSAIEEVKKITAERHGTVVTVKRVEKVQKKFLGRPVEVWKLYFTHPQDKPAIWDKIREHPAVIDIYEYDIPFAKRYLIDKGLVPMEGDEELKMLAFDIETLYHEGEEFAEGPILMISYADEEGARVITWKNVDLPYVDVVSTEREMIKRFLRVVKEKDPDVLITYNGDNFDFAYLKKRCEKLGINFALGRDGSEPKIQRMGDRFAVEVKGRIHFDLYPVIRRTINLPTYTLEAVYEAVFGQPKEKVYAEEITTAWETGENLERVARYSMEDAKVTYELGKEFLPMEAQLSRLIGQSLWDVSRSSTGNLVEWFLLRKAYERNELAPNKPDEKELARRRQSYEGGYVKEPERGLWENIVYLDFRSLYPSIIITHNVSPDTLNREGCKEYDVAPQVGHRFCKDFPGFIPSLLGDLLEERQKIKKKMKATIDPIERKLLDYRQRAIKILANSYYGYYGYARARWYCKECAESVTAWGREYITMTIKEIEEKYGFKVIYSDTDGFFATIPGADAETVKKKAMEFLKYINAKLPGALELEYEGFYKRGFFVTKKKYAVIDEEGKITTRGLEIVRRDWSEIAKETQARVLEALLKDGDVEKAVRIVKEVTEKLSKYEVPPEKLVIHEQITRDLKDYKATGPHVAVAKRLAARGVKIRPGTVISYIVLKGSGRIGDRAIPFDEFDPTKHKYDAEYYIENQVLPAVERILRAFGYRKEDLRYQKTRQVGLSAWLKPKGT

SEQ ID NO: 3026 - protein, 774 aa, synthetic construct
MILDTDMITEDGKPVIRIFKKENGEFKIEYDRTFEAYFYALLKDDSAIEEVKKITAERHGTVVTVKRVEKVQKKFLGRPVEVWKLYFTHPQDQPAIRDKIREHPAVIDIYEYDIPFAKRYLIDKGLVPMEGDEELKMLAFDIETLYHEGEEFAEGPILMISYADEEGARVITWKNVDLPYVDVVSTEREMIKRFLRVVKEKDPDVLITYNGDNFDFAYLKKRCEKLGINFALGRDGSEPKIQRMGDRFAVEVKGRIHFDLYPVIRRTINLPTYTLEAVYEAVFGQPKEKVYAEEITTAWETGENLERVARYSMEDAKVTYELGKEFLPMEAQLSRLIGQSLWDVSRSSTGNLVEWFLLRKAYERNELAPNKPDEKELARRRQSYEGGYVKEPERGLWENIVYLDFRSLYPSIIITHNVSPDTLNREGCKEYDVAPQVGHRFCKDFPGFIPSLLGDLLEERQKIKKKMKATIDPIERKLLDYRQRAIKILANSYYGYYGYARARWYCKECAESVTAWGREYITMTIKEIEEKYGFKVIYSDTDGFFATIPGADAETVKKKAMEFLKYINAKLPGALELEYEGFYKRGFFVTKKKYAVIDEEGKITTRGLEIVRRDWSEIAKETQARVLEALLKDGDVEKAVRIVKEVTEKLSKYEVPPEKLVIHEQITRDLKDYKATGPHVAVAKRLAARGVKIRPGTVISYIVLKGSGRIGDRAIPFDEFDPTKHKYDAEYYIENQVLPAVERILRAFGYRKEDLRYQKTRQVGLSAWLKPKGT

SEQ ID NO: 3027 - protein, 774 aa, synthetic construct
MILDTDMITEDGKPVIRIFKKENGEFKIEYDRTFEAYFYALLKDDSAIEEVKKITAERHGTVVTVKRVEKVQKKFLGRPVEVWKLYFTHPQDRPAIRDKIREHPAVIDIYEYDIPFAKRYLIDKGLVPMEGDEELKMLAFDIETLYHEGEEFAEGPILMISYADEEGARVITWKNVDLPYVDVVSTEREMIKRFLRVVKEKDPDVLITYNGDNFDFAYLKKRCEKLGINFALGRDGSEPKIQRMGDRFAVEVKGRIHFDLYPVIRRTINLPTYTLEAVYEAVFGQPKEKVYAEEITTAWETGENLERVARYSMEDAKVTYELGKEFLPMEAQLSRLIGQSLWDVSRSSTGNLVEWFLLRKAYERNELAPNKPDEKELARRRQSYEGGYVKEPERGLWENIVYLDFRSLYPSIIITHNVSPDTLNREGCKEYDVAPQVGHRFCKDFPGFIPSLLGDLLEERQKIKKKMKATIDPIERKLLDYRQRAIKILANSYYGYYGYARARWYCKECAESVTAWGREYITMTIKEIEEKYGFKVIYSDTDGFFATIPGADAETVKKKAMEFLKYINAKLPGALELEYEGFYKRGFFVTKKKYAVIDEEGKITTRGLEIVRRDWSEIAKETQARVLEALLKDGDVEKAVRIVKEVTEKLSKYEVPPEKLVIHEQITRDLKDYKATGPHVAVAKRLAARGVKIRPGTVISYIVLKGSGRIGDRAIPFDEFDPTKHKYDAEYYIENQVLPAVERILRAFGYRKEDLRYQKTRQVGLSAWLKPKGT

SEQ ID NO: 3028 - protein, 774 aa, synthetic construct
MILDTDMITEDGKPVIRIFKKENGEFKIEYDRTFEAYFYALLKDDSAIEEVKKITAERHGTVVTVKRVEKVQKKFLGRPVEVWKLYFTHPQDRPAIWDKIREHPAVIDIYEYDIPFAKRYLIDKGLVPMEGDEELKMLAFDIETLYHEGEEFAEGPILMISYADEEGARVITWKNVDLPYVDVVSTEREMIKRFLRVVKEKDPDVLITYNGDNFDFAYLKKRCEKLGINFALGRDGSEPKIQRMGDRFAVEVKGRIHFDLYPVIRRTINLPTYTLEAVYEAVFGQPKEKVYAEEITTAWETGENLERVARYSMEDAKVTYELGKEFLPMEAQLSRLIGQSLWDVSRSSTGNLVEWFLLRKAYERNELAPNKPDEKELARRRQSYEGGYVKEPERGLWENIVYLDFRSLYPSIIITHNVSPDTLNREGCKEYDVAPQVGHRFCKDFPGFIPSLLGDLLEERQKIKKKMKATIDPIERKLLDYRQRAIKILANSYYGYYGYARARWYCKECAESVTAWGREYITMTIKEIEEKYGFKVIYSDTDGFFATIPGADAETVKKKAMEFLKYINAKLPGALELEYEGFYKRGFFVTKKKYAVIDEEGKITTRGLEIVRRDWSEIAKETQARVLEALLKDGDVEKAVRIVKEVTEKLSKYEVPPEKLVIHEQITRDLKDYKATGPHVAVAKRLAARGVKIRPGTVISYIVLKGSGRIGDRAIPFDEFDPTKHKYDAEYYIENQVLPAVERILRAFGYRKEDLRYQKTRQVGLSAWLKPKGT

SEQ ID NO: 3029 - protein, 774 aa, synthetic construct
MILDTDMITEDGKPVIRIFKKENGEFKIEYDRTFEHYFYALLKDDSAIEEVKKITAERHGTVVTVKRVEKVQKKFLGRPVEVWKLYFTHPQDVPAIRDKIREHPAVIDIYEYDIPFAKRYLIDKGLVPMEGDEELKMLAFDIETLYHEGEEFAEGPILMISYADEEGARVITWKNVDLPYVDVVSTEREMIKRFLRVVKEKDPDVLITYNGDNFDFAYLKKRCEKLGINFALGRDGSEPKIQRMGDRFAVEVKGRIHFDLYPVIRRTINLPTYTLEAVYEAVFGQPKEKVYAEEITTAWETGENLERVARYSMEDAKVTYELGKEFLPMEAQLSRLIGQSLWDVSRSSTGNLVEWFLLRKAYERNELAPNKPDEKELARRRQSYEGGYVKEPERGLWENIVYLDFRSLYPSIIITHNVSPDTLNREGCKEYDVAPQVGHRFCKDFPGFIPSLLGDLLEERQKIKKKMKATIDPIERKLLDYRQRAIKILANSYYGYYGYARARWYCKECAESVTAWGREYITMTIKEIEEKYGFKVIYSDTDGFFATIPGADAETVKKKAMEFLKYINAKLPGALELEYEGFYKRGFFVTKKKYAVIDEEGKITTRGLEIVRRDWSEIAKETQARVLEALLKDGDVEKAVRIVKEVTEKLSKYEVPPEKLVIHEQITRDLKDYKATGPHVAVAKRLAARGVKIRPGTVISYIVLKGSGRIGDRAIPFDEFDPTKHKYDAEYYIENQVLPAVERILRAFGYRKEDLRYQKTRQVGLSAWLKPKGT

SEQ ID NO: 3030 - protein, 774 aa, synthetic construct
MILDTDMITEDGKPVIRIFKKENGEFKIEYDRTFEHYFYALLKDDSAIEEVKKITAERHGTVVTVKRVEKVQKKFLGRPVEVWKLYFTHFQDVPAIRDKIREHPAVIDIYEYDIPFAKRYLIDKGLVPMEGDEELKMLAFDIETLYHEGEEFAEGPILMISYADEEGARVITWKNVDLPYVDVVSTEREMIKRFLRVVKEKDPDVLITYNGDNFDFAYLKKRCEKLGINFALGRDGSEPKIQRMGDRFAVEVKGRIHFDLYPVIRRTINLPTYTLEAVYEAVFGQPKEKVYAEEITTAWETGENLERVARYSMEDAKVTYELGKEFLPMEAQLSRLIGQSLWDVSRSSTGNLVEWFLLRKAYERNELAPNKPDEKELARRRQSYEGGYVKEPERGLWENIVYLDFRSLYPSIIITHNVSPDTLNREGCKEYDVAPQVGHRFCKDFPGFIPSLLGDLLEERQKIKKKMKATIDPIERKLLDYRQRAIKILANSYYGYYGYARARWYCKECAESVTAWGREYITMTIKEIEEKYGFKVIYSDTDGFFATIPGADAETVKKKAMEFLKYINAKLPGALELEYEGFYKRGFFVTKKKYAVIDEEGKITTRGLEIVRRDWSEIAKETQARVLEALLKDGDVEKAVRIVKEVTEKLSKYEVPPEKLVIHEQITRDLKDYKATGPHVAVAKRLAARGVKIRPGTVISYIVLKGSGRIGDRAIPFDEFDPTKHKYDAEYYIENQVLPAVERILRAFGYRKEDLRYQKTRQVGLSAWLKPKGT

SEQ ID NO: 3031 - protein, 774 aa, synthetic construct
MILDTDMITEDGKPVIRIFKKENGEFKIEYDRTFEHYFYALLKDDSAIEEVKKITAERHGTVVTVKRVEKVQKKFLGRPVEVWKLYFTHFQDIPAIRDKIREHPAVIDIYEYDIPFAKRYLIDKGLVPMEGDEELKMLAFDIETLYHEGEEFAEGPILMISYADEEGARVITWKNVDLPYVDVVSTEREMIKRFLRVVKEKDPDVLITYNGDNFDFAYLKKRCEKLGINFALGRDGSEPKIQRMGDRFAVEVKGRIHFDLYPVIRRTINLPTYTLEAVYEAVFGQPKEKVYAEEITTAWETGENLERVARYSMEDAKVTYELGKEFLPMEAQLSRLIGQSLWDVSRSSTGNLVEWFLLRKAYERNELAPNKPDEKELARRRQSYEGGYVKEPERGLWENIVYLDFRSLYPSIIITHNVSPDTLNREGCKEYDVAPQVGHRFCKDFPGFIPSLLGDLLEERQKIKKKMKATIDPIERKLLDYRQRAIKILANSYYGYYGYARARWYCKECAESVTAWGREYITMTIKEIEEKYGFKVIYSDTDGFFATIPGADAETVKKKAMEFLKYINAKLPGALELEYEGFYKRGFFVTKKKYAVIDEEGKITTRGLEIVRRDWSEIAKETQARVLEALLKDGDVEKAVRIVKEVTEKLSKYEVPPEKLVIHEQITRDLKDYKATGPHVAVAKRLAARGVKIRPGTVISYIVLKGSGRIGDRAIPFDEFDPTKHKYDAEYYIENQVLPAVERILRAFGYRKEDLRYQKTRQVGLSAWLKPKGT

SEQ ID NO: 3032 - protein, 774 aa, synthetic construct
MILDTDMITEDGKPVIRIFKKENGEFKIEYDRTFEHYFYALLKDDSAIEEVKKITAERHGTVVTVKRVEKVQKKFLGRPVEVWKLYFTHIQDVPAIRDKIREHPAVIDIYEYDIPFAKRYLIDKGLVPMEGDEELKMLAFDIETLYHEGEEFAEGPILMISYADEEGARVITWKNVDLPYVDVVSTEREMIKRFLRVVKEKDPDVLITYNGDNFDFAYLKKRCEKLGINFALGRDGSEPKIQRMGDRFAVEVKGRIHFDLYPVIRRTINLPTYTLEAVYEAVFGQPKEKVYAEEITTAWETGENLERVARYSMEDAKVTYELGKEFLPMEAQLSRLIGQSLWDVSRSSTGNLVEWFLLRKAYERNELAPNKPDEKELARRRQSYEGGYVKEPERGLWENIVYLDFRSLYPSIIITHNVSPDTLNREGCKEYDVAPQVGHRFCKDFPGFIPSLLGDLLEERQKIKKKMKATIDPIERKLLDYRQRAIKILANSYYGYYGYARARWYCKECAESVTAWGREYITMTIKEIEEKYGFKVIYSDTDGFFATIPGADAETVKKKAMEFLKYINAKLPGALELEYEGFYKRGFFVTKKKYAVIDEEGKITTRGLEIVRRDWSEIAKETQARVLEALLKDGDVEKAVRIVKEVTEKLSKYEVPPEKLVIHEQITRDLKDYKATGPHVAVAKRLAARGVKIRPGTVISYIVLKGSGRIGDRAIPFDEFDPTKHKYDAEYYIENQVLPAVERILRAFGYRKEDLRYQKTRQVGLSAWLKPKGT

SEQ ID NO: 3033 - protein, 774 aa, synthetic construct
MILDTDMITEDGKPVIRIFKKENGEFKIEYDRTFEHYFYALLKDDSAIEEVKKITAERHGTVVTVKRVEKVQKKFLGRPVEVWKLYFTHIQDIPAIRDKIREHPAVIDIYEYDIPFAKRYLIDKGLVPMEGDEELKMLAFDIETLYHEGEEFAEGPILMISYADEEGARVITWKNVDLPYVDVVSTEREMIKRFLRVVKEKDPDVLITYNGDNFDFAYLKKRCEKLGINFALGRDGSEPKIQRMGDRFAVEVKGRIHFDLYPVIRRTINLPTYTLEAVYEAVFGQPKEKVYAEEITTAWETGENLERVARYSMEDAKVTYELGKEFLPMEAQLSRLIGQSLWDVSRSSTGNLVEWFLLRKAYERNELAPNKPDEKELARRRQSYEGGYVKEPERGLWENIVYLDFRSLYPSIIITHNVSPDTLNREGCKEYDVAPQVGHRFCKDFPGFIPSLLGDLLEERQKIKKKMKATIDPIERKLLDYRQRAIKILANSYYGYYGYARARWYCKECAESVTAWGREYITMTIKEIEEKYGFKVIYSDTDGFFATIPGADAETVKKKAMEFLKYINAKLPGALELEYEGFYKRGFFVTKKKYAVIDEEGKITTRGLEIVRRDWSEIAKETQARVLEALLKDGDVEKAVRIVKEVTEKLSKYEVPPEKLVIHEQITRDLKDYKATGPHVAVAKRLAARGVKIRPGTVISYIVLKGSGRIGDRAIPFDEFDPTKHKYDAEYYIENQVLPAVERILRAFGYRKEDLRYQKTRQVGLSAWLKPKGT

SEQ ID NO: 3034 - protein, 774 aa, synthetic construct
MILDTDMITEDGKPVIRIFKKENGEFKIEYDRTFEHYFYALLKDDSAIEEVKKITAERHGTVVTVKRVEKVQKKFLGRPVEVWKLYFTHWQDVPAIRDKIREHPAVIDIYEYDIPFAKRYLIDKGLVPMEGDEELKMLAFDIETLYHEGEEFAEGPILMISYADEEGARVITWKNVDLPYVDVVSTEREMIKRFLRVVKEKDPDVLITYNGDNFDFAYLKKRCEKLGINFALGRDGSEPKIQRMGDRFAVEVKGRIHFDLYPVIRRTINLPTYTLEAVYEAVFGQPKEKVYAEEITTAWETGENLERVARYSMEDAKVTYELGKEFLPMEAQLSRLIGQSLWDVSRSSTGNLVEWFLLRKAYERNELAPNKPDEKELARRRQSYEGGYVKEPERGLWENIVYLDFRSLYPSIIITHNVSPDTLNREGCKEYDVAPQVGHRFCKDFPGFIPSLLGDLLEERQKIKKKMKATIDPIERKLLDYRQRAIKILANSYYGYYGYARARWYCKECAESVTAWGREYITMTIKEIEEKYGFKVIYSDTDGFFATIPGADAETVKKKAMEFLKYINAKLPGALELEYEGFYKRGFFVTKKKYAVIDEEGKITTRGLEIVRRDWSEIAKETQARVLEALLKDGDVEKAVRIVKEVTEKLSKYEVPPEKLVIHEQITRDLKDYKATGPHVAVAKRLAARGVKIRPGTVISYIVLKGSGRIGDRAIPFDEFDPTKHKYDAEYYIENQVLPAVERILRAFGYRKEDLRYQKTRQVGLSAWLKPKGT

SEQ ID NO: 3035 - protein, 774 aa, synthetic construct
MILDTDMITEDGKPVIRIFKKENGEFKIEYDRTFEHYFYALLKDDSAIEEVKKITAERHGTVVTVKRVEKVQKKFLGRPVEVWKLYFTHWQDIPAIRDKIREHPAVIDIYEYDIPFAKRYLIDKGLVPMEGDEELKMLAFDIETLYHEGEEFAEGPILMISYADEEGARVITWKNVDLPYVDVVSTEREMIKRFLRVVKEKDPDVLITYNGDNFDFAYLKKRCEKLGINFALGRDGSEPKIQRMGDRFAVEVKGRIHFDLYPVIRRTINLPTYTLEAVYEAVFGQPKEKVYAEEITTAWETGENLERVARYSMEDAKVTYELGKEFLPMEAQLSRLIGQSLWDVSRSSTGNLVEWFLLRKAYERNELAPNKPDEKELARRRQSYEGGYVKEPERGLWENIVYLDFRSLYPSIIITHNVSPDTLNREGCKEYDVAPQVGHRFCKDFPGFIPSLLGDLLEERQKIKKKMKATIDPIERKLLDYRQRAIKILANSYYGYYGYARARWYCKECAESVTAWGREYITMTIKEIEEKYGFKVIYSDTDGFFATIPGADAETVKKKAMEFLKYINAKLPGALELEYEGFYKRGFFVTKKKYAVIDEEGKITTRGLEIVRRDWSEIAKETQARVLEALLKDGDVEKAVRIVKEVTEKLSKYEVPPEKLVIHEQITRDLKDYKATGPHVAVAKRLAARGVKIRPGTVISYIVLKGSGRIGDRAIPFDEFDPTKHKYDAEYYIENQVLPAVERILRAFGYRKEDLRYQKTRQVGLSAWLKPKGT

SEQ ID NO: 3036 - protein, 774 aa, synthetic construct
MILDTDMITEDGKPVIRIFKKENGEFKIEYDRTFEHYFYALLKDDSAIEEVKKITAERHGTVVTVKRVEKVQKKFLGRPVEVWKLYFTHYQDVPAIRDKIREHPAVIDIYEYDIPFAKRYLIDKGLVPMEGDEELKMLAFDIETLYHEGEEFAEGPILMISYADEEGARVITWKNVDLPYVDVVSTEREMIKRFLRVVKEKDPDVLITYNGDNFDFAYLKKRCEKLGINFALGRDGSEPKIQRMGDRFAVEVKGRIHFDLYPVIRRTINLPTYTLEAVYEAVFGQPKEKVYAEEITTAWETGENLERVARYSMEDAKVTYELGKEFLPMEAQLSRLIGQSLWDVSRSSTGNLVEWFLLRKAYERNELAPNKPDEKELARRRQSYEGGYVKEPERGLWENIVYLDFRSLYPSIIITHNVSPDTLNREGCKEYDVAPQVGHRFCKDFPGFIPSLLGDLLEERQKIKKKMKATIDPIERKLLDYRQRAIKILANSYYGYYGYARARWYCKECAESVTAWGREYITMTIKEIEEKYGFKVIYSDTDGFFATIPGADAETVKKKAMEFLKYINAKLPGALELEYEGFYKRGFFVTKKKYAVIDEEGKITTRGLEIVRRDWSEIAKETQARVLEALLKDGDVEKAVRIVKEVTEKLSKYEVPPEKLVIHEQITRDLKDYKATGPHVAVAKRLAARGVKIRPGTVISYIVLKGSGRIGDRAIPFDEFDPTKHKYDAEYYIENQVLPAVERILRAFGYRKEDLRYQKTRQVGLSAWLKPKGT

SEQ ID NO: 3037 - protein, 774 aa, synthetic construct
MILDTDMITEDGKPVIRIFKKENGEFKIEYDRTFEHYFYALLKDDSAIEEVKKITAERHGTVVTVKRVEKVQKKFLGRPVEVWKLYFTHYQDVPAIWDKIREHPAVIDIYEYDIPFAKRYLIDKGLVPMEGDEELKMLAFDIETLYHEGEEFAEGPILMISYADEEGARVITWKNVDLPYVDVVSTEREMIKRFLRVVKEKDPDVLITYNGDNFDFAYLKKRCEKLGINFALGRDGSEPKIQRMGDRFAVEVKGRIHFDLYPVIRRTINLPTYTLEAVYEAVFGQPKEKVYAEEITTAWETGENLERVARYSMEDAKVTYELGKEFLPMEAQLSRLIGQSLWDVSRSSTGNLVEWFLLRKAYERNELAPNKPDEKELARRRQSYEGGYVKEPERGLWENIVYLDFRSLYPSIIITHNVSPDTLNREGCKEYDVAPQVGHRFCKDFPGFIPSLLGDLLEERQKIKKKMKATIDPIERKLLDYRQRAIKILANSYYGYYGYARARWYCKECAESVTAWGREYITMTIKEIEEKYGFKVIYSDTDGFFATIPGADAETVKKKAMEFLKYINAKLPGALELEYEGFYKRGFFVTKKKYAVIDEEGKITTRGLEIVRRDWSEIAKETQARVLEALLKDGDVEKAVRIVKEVTEKLSKYEVPPEKLVIHEQITRDLKDYKATGPHVAVAKRLAARGVKIRPGTVISYIVLKGSGRIGDRAIPFDEFDPTKHKYDAEYYIENQVLPAVERILRAFGYRKEDLRYQKTRQVGLSAWLKPKGT

SEQ ID NO: 3038 - protein, 774 aa, synthetic construct
MILDTDMITEDGKPVIRIFKKENGEFKIEYDRTFEHYFYALLKDDSAIEEVKKITAERHGTVVTVKRVEKVQKKFLGRPVEVWKLYFTHYQDIPAIRDKIREHPAVIDIYEYDIPFAKRYLIDKGLVPMEGDEELKMLAFDIETLYHEGEEFAEGPILMISYADEEGARVITWKNVDLPYVDVVSTEREMIKRFLRVVKEKDPDVLITYNGDNFDFAYLKKRCEKLGINFALGRDGSEPKIQRMGDRFAVEVKGRIHFDLYPVIRRTINLPTYTLEAVYEAVFGQPKEKVYAEEITTAWETGENLERVARYSMEDAKVTYELGKEFLPMEAQLSRLIGQSLWDVSRSSTGNLVEWFLLRKAYERNELAPNKPDEKELARRRQSYEGGYVKEPERGLWENIVYLDFRSLYPSIIITHNVSPDTLNREGCKEYDVAPQVGHRFCKDFPGFIPSLLGDLLEERQKIKKKMKATIDPIERKLLDYRQRAIKILANSYYGYYGYARARWYCKECAESVTAWGREYITMTIKEIEEKYGFKVIYSDTDGFFATIPGADAETVKKKAMEFLKYINAKLPGALELEYEGFYKRGFFVTKKKYAVIDEEGKITTRGLEIVRRDWSEIAKETQARVLEALLKDGDVEKAVRIVKEVTEKLSKYEVPPEKLVIHEQITRDLKDYKATGPHVAVAKRLAARGVKIRPGTVISYIVLKGSGRIGDRAIPFDEFDPTKHKYDAEYYIENQVLPAVERILRAFGYRKEDLRYQKTRQVGLSAWLKPKGT

SEQ ID NO: 3039 - protein, 774 aa, synthetic construct
MILDTDMITEDGKPVIRIFKKENGEFKIEYDRTFEHYFYALLKDDSAIEEVKKITAERHGTVVTVKRVEKVQKKFLGRPVEVWKLYFTHPQDVPAIFDKIREHPAVIDIYEYDIPFAKRYLIDKGLVPMEGDEELKMLAFDIETLYHEGEEFAEGPILMISYADEEGARVITWKNVDLPYVDVVSTEREMIKRFLRVVKEKDPDVLITYNGDNFDFAYLKKRCEKLGINFALGRDGSEPKIQRMGDRFAVEVKGRIHFDLYPVIRRTINLPTYTLEAVYEAVFGQPKEKVYAEEITTAWETGENLERVARYSMEDAKVTYELGKEFLPMEAQLSRLIGQSLWDVSRSSTGNLVEWFLLRKAYERNELAPNKPDEKELARRRQSYEGGYVKEPERGLWENIVYLDFRSLYPSIIITHNVSPDTLNREGCKEYDVAPQVGHRFCKDFPGFIPSLLGDLLEERQKIKKKMKATIDPIERKLLDYRQRAIKILANSYYGYYGYARARWYCKECAESVTAWGREYITMTIKEIEEKYGFKVIYSDTDGFFATIPGADAETVKKKAMEFLKYINAKLPGALELEYEGFYKRGFFVTKKKYAVIDEEGKITTRGLEIVRRDWSEIAKETQARVLEALLKDGDVEKAVRIVKEVTEKLSKYEVPPEKLVIHEQITRDLKDYKATGPHVAVAKRLAARGVKIRPGTVISYIVLKGSGRIGDRAIPFDEFDPTKHKYDAEYYIENQVLPAVERILRAFGYRKEDLRYQKTRQVGLSAWLKPKGT

SEQ ID NO: 3040 - protein, 774 aa, synthetic construct
MILDTDMITEDGKPVIRIFKKENGEFKIEYDRTFEHYFYALLKDDSAIEEVKKITAERHGTVVTVKRVEKVQKKFLGRPVEVWKLYFTHPQDIPAIRDKIREHPAVIDIYEYDIPFAKRYLIDKGLVPMEGDEELKMLAFDIETLYHEGEEFAEGPILMISYADEEGARVITWKNVDLPYVDVVSTEREMIKRFLRVVKEKDPDVLITYNGDNFDFAYLKKRCEKLGINFALGRDGSEPKIQRMGDRFAVEVKGRIHFDLYPVIRRTINLPTYTLEAVYEAVFGQPKEKVYAEEITTAWETGENLERVARYSMEDAKVTYELGKEFLPMEAQLSRLIGQSLWDVSRSSTGNLVEWFLLRKAYERNELAPNKPDEKELARRRQSYEGGYVKEPERGLWENIVYLDFRSLYPSIIITHNVSPDTLNREGCKEYDVAPQVGHRFCKDFPGFIPSLLGDLLEERQKIKKKMKATIDPIERKLLDYRQRAIKILANSYYGYYGYARARWYCKECAESVTAWGREYITMTIKEIEEKYGFKVIYSDTDGFFATIPGADAETVKKKAMEFLKYINAKLPGALELEYEGFYKRGFFVTKKKYAVIDEEGKITTRGLEIVRRDWSEIAKETQARVLEALLKDGDVEKAVRIVKEVTEKLSKYEVPPEKLVIHEQITRDLKDYKATGPHVAVAKRLAARGVKIRPGTVISYIVLKGSGRIGDRAIPFDEFDPTKHKYDAEYYIENQVLPAVERILRAFGYRKEDLRYQKTRQVGLSAWLKPKGT

SEQ ID NO: 3041 - protein, 774 aa, synthetic construct
MILDTDMITEDGKPVIRIFKKENGEFKIEYDRTFEHYFYALLKDDSAIEEVKKITAERHGTVVTVKRVEKVQKKFLGRPVEVWKLYFTHPQDIPAIHDKIREHPAVIDIYEYDIPFAKRYLIDKGLVPMEGDEELKMLAFDIETLYHEGEEFAEGPILMISYADEEGARVITWKNVDLPYVDVVSTEREMIKRFLRVVKEKDPDVLITYNGDNFDFAYLKKRCEKLGINFALGRDGSEPKIQRMGDRFAVEVKGRIHFDLYPVIRRTINLPTYTLEAVYEAVFGQPKEKVYAEEITTAWETGENLERVARYSMEDAKVTYELGKEFLPMEAQLSRLIGQSLWDVSRSSTGNLVEWFLLRKAYERNELAPNKPDEKELARRRQSYEGGYVKEPERGLWENIVYLDFRSLYPSIIITHNVSPDTLNREGCKEYDVAPQVGHRFCKDFPGFIPSLLGDLLEERQKIKKKMKATIDPIERKLLDYRQRAIKILANSYYGYYGYARARWYCKECAESVTAWGREYITMTIKEIEEKYGFKVIYSDTDGFFATIPGADAETVKKKAMEFLKYINAKLPGALELEYEGFYKRGFFVTKKKYAVIDEEGKITTRGLEIVRRDWSEIAKETQARVLEALLKDGDVEKAVRIVKEVTEKLSKYEVPPEKLVIHEQITRDLKDYKATGPHVAVAKRLAARGVKIRPGTVISYIVLKGSGRIGDRAIPFDEFDPTKHKYDAEYYIENQVLPAVERILRAFGYRKEDLRYQKTRQVGLSAWLKPKGT

SEQ ID NO: 3042 - protein, 774 aa, synthetic construct
MILDTDMITEDGKPVIRIFKKENGEFKIEYDRTFEHYFYALLKDDSAIEEVKKITAERHGTVVTVKRVEKVQKKFLGRPVEVWKLYFTHPQDIPAIWDKIREHPAVIDIYEYDIPFAKRYLIDKGLVPMEGDEELKMLAFDIETLYHEGEEFAEGPILMISYADEEGARVITWKNVDLPYVDVVSTEREMIKRFLRVVKEKDPDVLITYNGDNFDFAYLKKRCEKLGINFALGRDGSEPKIQRMGDRFAVEVKGRIHFDLYPVIRRTINLPTYTLEAVYEAVFGQPKEKVYAEEITTAWETGENLERVARYSMEDAKVTYELGKEFLPMEAQLSRLIGQSLWDVSRSSTGNLVEWFLLRKAYERNELAPNKPDEKELARRRQSYEGGYVKEPERGLWENIVYLDFRSLYPSIIITHNVSPDTLNREGCKEYDVAPQVGHRFCKDFPGFIPSLLGDLLEERQKIKKKMKATIDPIERKLLDYRQRAIKILANSYYGYYGYARARWYCKECAESVTAWGREYITMTIKEIEEKYGFKVIYSDTDGFFATIPGADAETVKKKAMEFLKYINAKLPGALELEYEGFYKRGFFVTKKKYAVIDEEGKITTRGLEIVRRDWSEIAKETQARVLEALLKDGDVEKAVRIVKEVTEKLSKYEVPPEKLVIHEQITRDLKDYKATGPHVAVAKRLAARGVKIRPGTVISYIVLKGSGRIGDRAIPFDEFDPTKHKYDAEYYIENQVLPAVERILRAFGYRKEDLRYQKTRQVGLSAWLKPKGT

SEQ ID NO: 3043 - protein, 774 aa, synthetic construct
MILDTDMITEDGKPVIRIFKKENGEFKIEYDRTFEHYFYALLKDDSAIEEVKKITAERHGTVVTVKRVEKVQKKFLGRPVEVWKLYFTHPQDRPAIADKIREHPAVIDIYEYDIPFAKRYLIDKGLVPMEGDEELKMLAFDIETLYHEGEEFAEGPILMISYADEEGARVITWKNVDLPYVDVVSTEREMIKRFLRVVKEKDPDVLITYNGDNFDFAYLKKRCEKLGINFALGRDGSEPKIQRMGDRFAVEVKGRIHFDLYPVIRRTINLPTYTLEAVYEAVFGQPKEKVYAEEITTAWETGENLERVARYSMEDAKVTYELGKEFLPMEAQLSRLIGQSLWDVSRSSTGNLVEWFLLRKAYERNELAPNKPDEKELARRRQSYEGGYVKEPERGLWENIVYLDFRSLYPSIIITHNVSPDTLNREGCKEYDVAPQVGHRFCKDFPGFIPSLLGDLLEERQKIKKKMKATIDPIERKLLDYRQRAIKILANSYYGYYGYARARWYCKECAESVTAWGREYITMTIKEIEEKYGFKVIYSDTDGFFATIPGADAETVKKKAMEFLKYINAKLPGALELEYEGFYKRGFFVTKKKYAVIDEEGKITTRGLEIVRRDWSEIAKETQARVLEALLKDGDVEKAVRIVKEVTEKLSKYEVPPEKLVIHEQITRDLKDYKATGPHVAVAKRLAARGVKIRPGTVISYIVLKGSGRIGDRAIPFDEFDPTKHKYDAEYYIENQVLPAVERILRAFGYRKEDLRYQKTRQVGLSAWLKPKGT

SEQ ID NO: 3044 - protein, 774 aa, synthetic construct
MILDTDMITEDGKPVIRIFKKENGEFKIEYDRTFERYFYALLKDDSAIEEVKKITAERHGTVVTVKRVEKVQKKFLGRPVEVWKLYFTHPQDVPAIRDKIREHPAVIDIYEYDIPFAKRYLIDKGLVPMEGDEELKMLAFDIETLYHEGEEFAEGPILMISYADEEGARVITWKNVDLPYVDVVSTEREMIKRFLRVVKEKDPDVLITYNGDNFDFAYLKKRCEKLGINFALGRDGSEPKIQRMGDRFAVEVKGRIHFDLYPVIRRTINLPTYTLEAVYEAVFGQPKEKVYAEEITTAWETGENLERVARYSMEDAKVTYELGKEFLPMEAQLSRLIGQSLWDVSRSSTGNLVEWFLLRKAYERNELAPNKPDEKELARRRQSYEGGYVKEPERGLWENIVYLDFRSLYPSIIITHNVSPDTLNREGCKEYDVAPQVGHRFCKDFPGFIPSLLGDLLEERQKIKKKMKATIDPIERKLLDYRQRAIKILANSYYGYYGYARARWYCKECAESVTAWGREYITMTIKEIEEKYGFKVIYSDTDGFFATIPGADAETVKKKAMEFLKYINAKLPGALELEYEGFYKRGFFVTKKKYAVIDEEGKITTRGLEIVRRDWSEIAKETQARVLEALLKDGDVEKAVRIVKEVTEKLSKYEVPPEKLVIHEQITRDLKDYKATGPHVAVAKRLAARGVKIRPGTVISYIVLKGSGRIGDRAIPFDEFDPTKHKYDAEYYIENQVLPAVERILRAFGYRKEDLRYQKTRQVGLSAWLKPKGT

SEQ ID NO: 3045 - protein, 774 aa, synthetic construct
MILDTDMITEDGKPVIRIFKKENGEFKIEYDRTFERYFYALLKDDSAIEEVKKITAERHGTVVTVKRVEKVQKKFLGRPVEVWKLYFTHPQDVPAIADKIREHPAVIDIYEYDIPFAKRYLIDKGLVPMEGDEELKMLAFDIETLYHEGEEFAEGPILMISYADEEGARVITWKNVDLPYVDVVSTEREMIKRFLRVVKEKDPDVLITYNGDNFDFAYLKKRCEKLGINFALGRDGSEPKIQRMGDRFAVEVKGRIHFDLYPVIRRTINLPTYTLEAVYEAVFGQPKEKVYAEEITTAWETGENLERVARYSMEDAKVTYELGKEFLPMEAQLSRLIGQSLWDVSRSSTGNLVEWFLLRKAYERNELAPNKPDEKELARRRQSYEGGYVKEPERGLWENIVYLDFRSLYPSIIITHNVSPDTLNREGCKEYDVAPQVGHRFCKDFPGFIPSLLGDLLEERQKIKKKMKATIDPIERKLLDYRQRAIKILANSYYGYYGYARARWYCKECAESVTAWGREYITMTIKEIEEKYGFKVIYSDTDGFFATIPGADAETVKKKAMEFLKYINAKLPGALELEYEGFYKRGFFVTKKKYAVIDEEGKITTRGLEIVRRDWSEIAKETQARVLEALLKDGDVEKAVRIVKEVTEKLSKYEVPPEKLVIHEQITRDLKDYKATGPHVAVAKRLAARGVKIRPGTVISYIVLKGSGRIGDRAIPFDEFDPTKHKYDAEYYIENQVLPAVERILRAFGYRKEDLRYQKTRQVGLSAWLKPKGT

SEQ ID NO: 3046 - protein, 774 aa, synthetic construct
MILDTDMITEDGKPVIRIFKKENGEFKIEYDRTFERYFYALLKDDSAIEEVKKITAERHGTVVTVKRVEKVQKKFLGRPVEVWKLYFTHPQDIPAIADKIREHPAVIDIYEYDIPFAKRYLIDKGLVPMEGDEELKMLAFDIETLYHEGEEFAEGPILMISYADEEGARVITWKNVDLPYVDVVSTEREMIKRFLRVVKEKDPDVLITYNGDNFDFAYLKKRCEKLGINFALGRDGSEPKIQRMGDRFAVEVKGRIHFDLYPVIRRTINLPTYTLEAVYEAVFGQPKEKVYAEEITTAWETGENLERVARYSMEDAKVTYELGKEFLPMEAQLSRLIGQSLWDVSRSSTGNLVEWFLLRKAYERNELAPNKPDEKELARRRQSYEGGYVKEPERGLWENIVYLDFRSLYPSIIITHNVSPDTLNREGCKEYDVAPQVGHRFCKDFPGFIPSLLGDLLEERQKIKKKMKATIDPIERKLLDYRQRAIKILANSYYGYYGYARARWYCKECAESVTAWGREYITMTIKEIEEKYGFKVIYSDTDGFFATIPGADAETVKKKAMEFLKYINAKLPGALELEYEGFYKRGFFVTKKKYAVIDEEGKITTRGLEIVRRDWSEIAKETQARVLEALLKDGDVEKAVRIVKEVTEKLSKYEVPPEKLVIHEQITRDLKDYKATGPHVAVAKRLAARGVKIRPGTVISYIVLKGSGRIGDRAIPFDEFDPTKHKYDAEYYIENQVLPAVERILRAFGYRKEDLRYQKTRQVGLSAWLKPKGT

SEQ ID NO: 3047 - protein, 774 aa, synthetic construct
MILDTDMITEDGKPVIRIFKKENGEFKIEYDRTFESYFYALLKDDSAIEEVKKITAERHGTVVTVKRVEKVQKKFLGRPVEVWKLYFTHPQDVPAIRDKIREHPAVIDIYEYDIPFAKRYLIDKGLVPMEGDEELKMLAFDIETLYHEGEEFAEGPILMISYADEEGARVITWKNVDLPYVDVVSTEREMIKRFLRVVKEKDPDVLITYNGDNFDFAYLKKRCEKLGINFALGRDGSEPKIQRMGDRFAVEVKGRIHFDLYPVIRRTINLPTYTLEAVYEAVFGQPKEKVYAEEITTAWETGENLERVARYSMEDAKVTYELGKEFLPMEAQLSRLIGQSLWDVSRSSTGNLVEWFLLRKAYERNELAPNKPDEKELARRRQSYEGGYVKEPERGLWENIVYLDFRSLYPSIIITHNVSPDTLNREGCKEYDVAPQVGHRFCKDFPGFIPSLLGDLLEERQKIKKKMKATIDPIERKLLDYRQRAIKILANSYYGYYGYARARWYCKECAESVTAWGREYITMTIKEIEEKYGFKVIYSDTDGFFATIPGADAETVKKKAMEFLKYINAKLPGALELEYEGFYKRGFFVTKKKYAVIDEEGKITTRGLEIVRRDWSEIAKETQARVLEALLKDGDVEKAVRIVKEVTEKLSKYEVPPEKLVIHEQITRDLKDYKATGPHVAVAKRLAARGVKIRPGTVISYIVLKGSGRIGDRAIPFDEFDPTKHKYDAEYYIENQVLPAVERILRAFGYRKEDLRYQKTRQVGLSAWLKPKGT

SEQ ID NO: 3048 - protein, 774 aa, synthetic construct
MILDTDMITEDGKPVIRIFKKENGEFKIEYDRTFESYFYALLKDDSAIEEVKKITAERHGTVVTVKRVEKVQKKFLGRPVEVWKLYFTHFQDVPAIRDKIREHPAVIDIYEYDIPFAKRYLIDKGLVPMEGDEELKMLAFDIETLYHEGEEFAEGPILMISYADEEGARVITWKNVDLPYVDVVSTEREMIKRFLRVVKEKDPDVLITYNGDNFDFAYLKKRCEKLGINFALGRDGSEPKIQRMGDRFAVEVKGRIHFDLYPVIRRTINLPTYTLEAVYEAVFGQPKEKVYAEEITTAWETGENLERVARYSMEDAKVTYELGKEFLPMEAQLSRLIGQSLWDVSRSSTGNLVEWFLLRKAYERNELAPNKPDEKELARRRQSYEGGYVKEPERGLWENIVYLDFRSLYPSIIITHNVSPDTLNREGCKEYDVAPQVGHRFCKDFPGFIPSLLGDLLEERQKIKKKMKATIDPIERKLLDYRQRAIKILANSYYGYYGYARARWYCKECAESVTAWGREYITMTIKEIEEKYGFKVIYSDTDGFFATIPGADAETVKKKAMEFLKYINAKLPGALELEYEGFYKRGFFVTKKKYAVIDEEGKITTRGLEIVRRDWSEIAKETQARVLEALLKDGDVEKAVRIVKEVTEKLSKYEVPPEKLVIHEQITRDLKDYKATGPHVAVAKRLAARGVKIRPGTVISYIVLKGSGRIGDRAIPFDEFDPTKHKYDAEYYIENQVLPAVERILRAFGYRKEDLRYQKTRQVGLSAWLKPKGT

SEQ ID NO: 3049 - protein, 774 aa, synthetic construct
MILDTDMITEDGKPVIRIFKKENGEFKIEYDRTFESYFYALLKDDSAIEEVKKITAERHGTVVTVKRVEKVQKKFLGRPVEVWKLYFTHFQDIPAIRDKIREHPAVIDIYEYDIPFAKRYLIDKGLVPMEGDEELKMLAFDIETLYHEGEEFAEGPILMISYADEEGARVITWKNVDLPYVDVVSTEREMIKRFLRVVKEKDPDVLITYNGDNFDFAYLKKRCEKLGINFALGRDGSEPKIQRMGDRFAVEVKGRIHFDLYPVIRRTINLPTYTLEAVYEAVFGQPKEKVYAEEITTAWETGENLERVARYSMEDAKVTYELGKEFLPMEAQLSRLIGQSLWDVSRSSTGNLVEWFLLRKAYERNELAPNKPDEKELARRRQSYEGGYVKEPERGLWENIVYLDFRSLYPSIIITHNVSPDTLNREGCKEYDVAPQVGHRFCKDFPGFIPSLLGDLLEERQKIKKKMKATIDPIERKLLDYRQRAIKILANSYYGYYGYARARWYCKECAESVTAWGREYITMTIKEIEEKYGFKVIYSDTDGFFATIPGADAETVKKKAMEFLKYINAKLPGALELEYEGFYKRGFFVTKKKYAVIDEEGKITTRGLEIVRRDWSEIAKETQARVLEALLKDGDVEKAVRIVKEVTEKLSKYEVPPEKLVIHEQITRDLKDYKATGPHVAVAKRLAARGVKIRPGTVISYIVLKGSGRIGDRAIPFDEFDPTKHKYDAEYYIENQVLPAVERILRAFGYRKEDLRYQKTRQVGLSAWLKPKGT

SEQ ID NO: 3050 - protein, 774 aa, synthetic construct
MILDTDMITEDGKPVIRIFKKENGEFKIEYDRTFESYFYALLKDDSAIEEVKKITAERHGTVVTVKRVEKVQKKFLGRPVEVWKLYFTHIQDIPAIRDKIREHPAVIDIYEYDIPFAKRYLIDKGLVPMEGDEELKMLAFDIETLYHEGEEFAEGPILMISYADEEGARVITWKNVDLPYVDVVSTEREMIKRFLRVVKEKDPDVLITYNGDNFDFAYLKKRCEKLGINFALGRDGSEPKIQRMGDRFAVEVKGRIHFDLYPVIRRTINLPTYTLEAVYEAVFGQPKEKVYAEEITTAWETGENLERVARYSMEDAKVTYELGKEFLPMEAQLSRLIGQSLWDVSRSSTGNLVEWFLLRKAYERNELAPNKPDEKELARRRQSYEGGYVKEPERGLWENIVYLDFRSLYPSIIITHNVSPDTLNREGCKEYDVAPQVGHRFCKDFPGFIPSLLGDLLEERQKIKKKMKATIDPIERKLLDYRQRAIKILANSYYGYYGYARARWYCKECAESVTAWGREYITMTIKEIEEKYGFKVIYSDTDGFFATIPGADAETVKKKAMEFLKYINAKLPGALELEYEGFYKRGFFVTKKKYAVIDEEGKITTRGLEIVRRDWSEIAKETQARVLEALLKDGDVEKAVRIVKEVTEKLSKYEVPPEKLVIHEQITRDLKDYKATGPHVAVAKRLAARGVKIRPGTVISYIVLKGSGRIGDRAIPFDEFDPTKHKYDAEYYIENQVLPAVERILRAFGYRKEDLRYQKTRQVGLSAWLKPKGT

SEQ ID NO: 3051 - protein, 774 aa, synthetic construct
MILDTDMITEDGKPVIRIFKKENGEFKIEYDRTFESYFYALLKDDSAIEEVKKITAERHGTVVTVKRVEKVQKKFLGRPVEVWKLYFTHIQDIPAIHDKIREHPAVIDIYEYDIPFAKRYLIDKGLVPMEGDEELKMLAFDIETLYHEGEEFAEGPILMISYADEEGARVITWKNVDLPYVDVVSTEREMIKRFLRVVKEKDPDVLITYNGDNFDFAYLKKRCEKLGINFALGRDGSEPKIQRMGDRFAVEVKGRIHFDLYPVIRRTINLPTYTLEAVYEAVFGQPKEKVYAEEITTAWETGENLERVARYSMEDAKVTYELGKEFLPMEAQLSRLIGQSLWDVSRSSTGNLVEWFLLRKAYERNELAPNKPDEKELARRRQSYEGGYVKEPERGLWENIVYLDFRSLYPSIIITHNVSPDTLNREGCKEYDVAPQVGHRFCKDFPGFIPSLLGDLLEERQKIKKKMKATIDPIERKLLDYRQRAIKILANSYYGYYGYARARWYCKECAESVTAWGREYITMTIKEIEEKYGFKVIYSDTDGFFATIPGADAETVKKKAMEFLKYINAKLPGALELEYEGFYKRGFFVTKKKYAVIDEEGKITTRGLEIVRRDWSEIAKETQARVLEALLKDGDVEKAVRIVKEVTEKLSKYEVPPEKLVIHEQITRDLKDYKATGPHVAVAKRLAARGVKIRPGTVISYIVLKGSGRIGDRAIPFDEFDPTKHKYDAEYYIENQVLPAVERILRAFGYRKEDLRYQKTRQVGLSAWLKPKGT

SEQ ID NO: 3052 - protein, 774 aa, synthetic construct
MILDTDMITEDGKPVIRIFKKENGEFKIEYDRTFESYFYALLKDDSAIEEVKKITAERHGTVVTVKRVEKVQKKFLGRPVEVWKLYFTHWQDVPAIRDKIREHPAVIDIYEYDIPFAKRYLIDKGLVPMEGDEELKMLAFDIETLYHEGEEFAEGPILMISYADEEGARVITWKNVDLPYVDVVSTEREMIKRFLRVVKEKDPDVLITYNGDNFDFAYLKKRCEKLGINFALGRDGSEPKIQRMGDRFAVEVKGRIHFDLYPVIRRTINLPTYTLEAVYEAVFGQPKEKVYAEEITTAWETGENLERVARYSMEDAKVTYELGKEFLPMEAQLSRLIGQSLWDVSRSSTGNLVEWFLLRKAYERNELAPNKPDEKELARRRQSYEGGYVKEPERGLWENIVYLDFRSLYPSIIITHNVSPDTLNREGCKEYDVAPQVGHRFCKDFPGFIPSLLGDLLEERQKIKKKMKATIDPIERKLLDYRQRAIKILANSYYGYYGYARARWYCKECAESVTAWGREYITMTIKEIEEKYGFKVIYSDTDGFFATIPGADAETVKKKAMEFLKYINAKLPGALELEYEGFYKRGFFVTKKKYAVIDEEGKITTRGLEIVRRDWSEIAKETQARVLEALLKDGDVEKAVRIVKEVTEKLSKYEVPPEKLVIHEQITRDLKDYKATGPHVAVAKRLAARGVKIRPGTVISYIVLKGSGRIGDRAIPFDEFDPTKHKYDAEYYIENQVLPAVERILRAFGYRKEDLRYQKTRQVGLSAWLKPKGT

SEQ ID NO: 3053 - protein, 774 aa, synthetic construct
MILDTDMITEDGKPVIRIFKKENGEFKIEYDRTFESYFYALLKDDSAIEEVKKITAERHGTVVTVKRVEKVQKKFLGRPVEVWKLYFTHWQDIPAIRDKIREHPAVIDIYEYDIPFAKRYLIDKGLVPMEGDEELKMLAFDIETLYHEGEEFAEGPILMISYADEEGARVITWKNVDLPYVDVVSTEREMIKRFLRVVKEKDPDVLITYNGDNFDFAYLKKRCEKLGINFALGRDGSEPKIQRMGDRFAVEVKGRIHFDLYPVIRRTINLPTYTLEAVYEAVFGQPKEKVYAEEITTAWETGENLERVARYSMEDAKVTYELGKEFLPMEAQLSRLIGQSLWDVSRSSTGNLVEWFLLRKAYERNELAPNKPDEKELARRRQSYEGGYVKEPERGLWENIVYLDFRSLYPSIIITHNVSPDTLNREGCKEYDVAPQVGHRFCKDFPGFIPSLLGDLLEERQKIKKKMKATIDPIERKLLDYRQRAIKILANSYYGYYGYARARWYCKECAESVTAWGREYITMTIKEIEEKYGFKVIYSDTDGFFATIPGADAETVKKKAMEFLKYINAKLPGALELEYEGFYKRGFFVTKKKYAVIDEEGKITTRGLEIVRRDWSEIAKETQARVLEALLKDGDVEKAVRIVKEVTEKLSKYEVPPEKLVIHEQITRDLKDYKATGPHVAVAKRLAARGVKIRPGTVISYIVLKGSGRIGDRAIPFDEFDPTKHKYDAEYYIENQVLPAVERILRAFGYRKEDLRYQKTRQVGLSAWLKPKGT

SEQ ID NO: 3054 - protein, 774 aa, synthetic construct
MILDTDMITEDGKPVIRIFKKENGEFKIEYDRTFESYFYALLKDDSAIEEVKKITAERHGTVVTVKRVEKVQKKFLGRPVEVWKLYFTHYQDVPAIADKIREHPAVIDIYEYDIPFAKRYLIDKGLVPMEGDEELKMLAFDIETLYHEGEEFAEGPILMISYADEEGARVITWKNVDLPYVDVVSTEREMIKRFLRVVKEKDPDVLITYNGDNFDFAYLKKRCEKLGINFALGRDGSEPKIQRMGDRFAVEVKGRIHFDLYPVIRRTINLPTYTLEAVYEAVFGQPKEKVYAEEITTAWETGENLERVARYSMEDAKVTYELGKEFLPMEAQLSRLIGQSLWDVSRSSTGNLVEWFLLRKAYERNELAPNKPDEKELARRRQSYEGGYVKEPERGLWENIVYLDFRSLYPSIIITHNVSPDTLNREGCKEYDVAPQVGHRFCKDFPGFIPSLLGDLLEERQKIKKKMKATIDPIERKLLDYRQRAIKILANSYYGYYGYARARWYCKECAESVTAWGREYITMTIKEIEEKYGFKVIYSDTDGFFATIPGADAETVKKKAMEFLKYINAKLPGALELEYEGFYKRGFFVTKKKYAVIDEEGKITTRGLEIVRRDWSEIAKETQARVLEALLKDGDVEKAVRIVKEVTEKLSKYEVPPEKLVIHEQITRDLKDYKATGPHVAVAKRLAARGVKIRPGTVISYIVLKGSGRIGDRAIPFDEFDPTKHKYDAEYYIENQVLPAVERILRAFGYRKEDLRYQKTRQVGLSAWLKPKGT

SEQ ID NO: 3055 - protein, 774 aa, synthetic construct
MILDTDMITEDGKPVIRIFKKENGEFKIEYDRTFESYFYALLKDDSAIEEVKKITAERHGTVVTVKRVEKVQKKFLGRPVEVWKLYFTHYQDIPAIRDKIREHPAVIDIYEYDIPFAKRYLIDKGLVPMEGDEELKMLAFDIETLYHEGEEFAEGPILMISYADEEGARVITWKNVDLPYVDVVSTEREMIKRFLRVVKEKDPDVLITYNGDNFDFAYLKKRCEKLGINFALGRDGSEPKIQRMGDRFAVEVKGRIHFDLYPVIRRTINLPTYTLEAVYEAVFGQPKEKVYAEEITTAWETGENLERVARYSMEDAKVTYELGKEFLPMEAQLSRLIGQSLWDVSRSSTGNLVEWFLLRKAYERNELAPNKPDEKELARRRQSYEGGYVKEPERGLWENIVYLDFRSLYPSIIITHNVSPDTLNREGCKEYDVAPQVGHRFCKDFPGFIPSLLGDLLEERQKIKKKMKATIDPIERKLLDYRQRAIKILANSYYGYYGYARARWYCKECAESVTAWGREYITMTIKEIEEKYGFKVIYSDTDGFFATIPGADAETVKKKAMEFLKYINAKLPGALELEYEGFYKRGFFVTKKKYAVIDEEGKITTRGLEIVRRDWSEIAKETQARVLEALLKDGDVEKAVRIVKEVTEKLSKYEVPPEKLVIHEQITRDLKDYKATGPHVAVAKRLAARGVKIRPGTVISYIVLKGSGRIGDRAIPFDEFDPTKHKYDAEYYIENQVLPAVERILRAFGYRKEDLRYQKTRQVGLSAWLKPKGT

SEQ ID NO: 3056 - protein, 774 aa, synthetic construct
MILDTDMITEDGKPVIRIFKKENGEFKIEYDRTFESYFYALLKDDSAIEEVKKITAERHGTVVTVKRVEKVQKKFLGRPVEVWKLYFTHPQDVPAIADKIREHPAVIDIYEYDIPFAKRYLIDKGLVPMEGDEELKMLAFDIETLYHEGEEFAEGPILMISYADEEGARVITWKNVDLPYVDVVSTEREMIKRFLRVVKEKDPDVLITYNGDNFDFAYLKKRCEKLGINFALGRDGSEPKIQRMGDRFAVEVKGRIHFDLYPVIRRTINLPTYTLEAVYEAVFGQPKEKVYAEEITTAWETGENLERVARYSMEDAKVTYELGKEFLPMEAQLSRLIGQSLWDVSRSSTGNLVEWFLLRKAYERNELAPNKPDEKELARRRQSYEGGYVKEPERGLWENIVYLDFRSLYPSIIITHNVSPDTLNREGCKEYDVAPQVGHRFCKDFPGFIPSLLGDLLEERQKIKKKMKATIDPIERKLLDYRQRAIKILANSYYGYYGYARARWYCKECAESVTAWGREYITMTIKEIEEKYGFKVIYSDTDGFFATIPGADAETVKKKAMEFLKYINAKLPGALELEYEGFYKRGFFVTKKKYAVIDEEGKITTRGLEIVRRDWSEIAKETQARVLEALLKDGDVEKAVRIVKEVTEKLSKYEVPPEKLVIHEQITRDLKDYKATGPHVAVAKRLAARGVKIRPGTVISYIVLKGSGRIGDRAIPFDEFDPTKHKYDAEYYIENQVLPAVERILRAFGYRKEDLRYQKTRQVGLSAWLKPKGT

SEQ ID NO: 3057 - protein, 774 aa, synthetic construct
MILDTDMITEDGKPVIRIFKKENGEFKIEYDRTFESYFYALLKDDSAIEEVKKITAERHGTVVTVKRVEKVQKKFLGRPVEVWKLYFTHPQDVPAIFDKIREHPAVIDIYEYDIPFAKRYLIDKGLVPMEGDEELKMLAFDIETLYHEGEEFAEGPILMISYADEEGARVITWKNVDLPYVDVVSTEREMIKRFLRVVKEKDPDVLITYNGDNFDFAYLKKRCEKLGINFALGRDGSEPKIQRMGDRFAVEVKGRIHFDLYPVIRRTINLPTYTLEAVYEAVFGQPKEKVYAEEITTAWETGENLERVARYSMEDAKVTYELGKEFLPMEAQLSRLIGQSLWDVSRSSTGNLVEWFLLRKAYERNELAPNKPDEKELARRRQSYEGGYVKEPERGLWENIVYLDFRSLYPSIIITHNVSPDTLNREGCKEYDVAPQVGHRFCKDFPGFIPSLLGDLLEERQKIKKKMKATIDPIERKLLDYRQRAIKILANSYYGYYGYARARWYCKECAESVTAWGREYITMTIKEIEEKYGFKVIYSDTDGFFATIPGADAETVKKKAMEFLKYINAKLPGALELEYEGFYKRGFFVTKKKYAVIDEEGKITTRGLEIVRRDWSEIAKETQARVLEALLKDGDVEKAVRIVKEVTEKLSKYEVPPEKLVIHEQITRDLKDYKATGPHVAVAKRLAARGVKIRPGTVISYIVLKGSGRIGDRAIPFDEFDPTKHKYDAEYYIENQVLPAVERILRAFGYRKEDLRYQKTRQVGLSAWLKPKGT

SEQ ID NO: 3058 - protein, 774 aa, synthetic construct
MILDTDMITEDGKPVIRIFKKENGEFKIEYDRTFESYFYALLKDDSAIEEVKKITAERHGTVVTVKRVEKVQKKFLGRPVEVWKLYFTHPQDVPAIHDKIREHPAVIDIYEYDIPFAKRYLIDKGLVPMEGDEELKMLAFDIETLYHEGEEFAEGPILMISYADEEGARVITWKNVDLPYVDVVSTEREMIKRFLRVVKEKDPDVLITYNGDNFDFAYLKKRCEKLGINFALGRDGSEPKIQRMGDRFAVEVKGRIHFDLYPVIRRTINLPTYTLEAVYEAVFGQPKEKVYAEEITTAWETGENLERVARYSMEDAKVTYELGKEFLPMEAQLSRLIGQSLWDVSRSSTGNLVEWFLLRKAYERNELAPNKPDEKELARRRQSYEGGYVKEPERGLWENIVYLDFRSLYPSIIITHNVSPDTLNREGCKEYDVAPQVGHRFCKDFPGFIPSLLGDLLEERQKIKKKMKATIDPIERKLLDYRQRAIKILANSYYGYYGYARARWYCKECAESVTAWGREYITMTIKEIEEKYGFKVIYSDTDGFFATIPGADAETVKKKAMEFLKYINAKLPGALELEYEGFYKRGFFVTKKKYAVIDEEGKITTRGLEIVRRDWSEIAKETQARVLEALLKDGDVEKAVRIVKEVTEKLSKYEVPPEKLVIHEQITRDLKDYKATGPHVAVAKRLAARGVKIRPGTVISYIVLKGSGRIGDRAIPFDEFDPTKHKYDAEYYIENQVLPAVERILRAFGYRKEDLRYQKTRQVGLSAWLKPKGT

SEQ ID NO: 3059 - protein, 774 aa, synthetic construct
MILDTDMITEDGKPVIRIFKKENGEFKIEYDRTFESYFYALLKDDSAIEEVKKITAERHGTVVTVKRVEKVQKKFLGRPVEVWKLYFTHPQDVPAIWDKIREHPAVIDIYEYDIPFAKRYLIDKGLVPMEGDEELKMLAFDIETLYHEGEEFAEGPILMISYADEEGARVITWKNVDLPYVDVVSTEREMIKRFLRVVKEKDPDVLITYNGDNFDFAYLKKRCEKLGINFALGRDGSEPKIQRMGDRFAVEVKGRIHFDLYPVIRRTINLPTYTLEAVYEAVFGQPKEKVYAEEITTAWETGENLERVARYSMEDAKVTYELGKEFLPMEAQLSRLIGQSLWDVSRSSTGNLVEWFLLRKAYERNELAPNKPDEKELARRRQSYEGGYVKEPERGLWENIVYLDFRSLYPSIIITHNVSPDTLNREGCKEYDVAPQVGHRFCKDFPGFIPSLLGDLLEERQKIKKKMKATIDPIERKLLDYRQRAIKILANSYYGYYGYARARWYCKECAESVTAWGREYITMTIKEIEEKYGFKVIYSDTDGFFATIPGADAETVKKKAMEFLKYINAKLPGALELEYEGFYKRGFFVTKKKYAVIDEEGKITTRGLEIVRRDWSEIAKETQARVLEALLKDGDVEKAVRIVKEVTEKLSKYEVPPEKLVIHEQITRDLKDYKATGPHVAVAKRLAARGVKIRPGTVISYIVLKGSGRIGDRAIPFDEFDPTKHKYDAEYYIENQVLPAVERILRAFGYRKEDLRYQKTRQVGLSAWLKPKGT

SEQ ID NO: 3060 - protein, 774 aa, synthetic construct
MILDTDMITEDGKPVIRIFKKENGEFKIEYDRTFESYFYALLKDDSAIEEVKKITAERHGTVVTVKRVEKVQKKFLGRPVEVWKLYFTHPQDIPAIRDKIREHPAVIDIYEYDIPFAKRYLIDKGLVPMEGDEELKMLAFDIETLYHEGEEFAEGPILMISYADEEGARVITWKNVDLPYVDVVSTEREMIKRFLRVVKEKDPDVLITYNGDNFDFAYLKKRCEKLGINFALGRDGSEPKIQRMGDRFAVEVKGRIHFDLYPVIRRTINLPTYTLEAVYEAVFGQPKEKVYAEEITTAWETGENLERVARYSMEDAKVTYELGKEFLPMEAQLSRLIGQSLWDVSRSSTGNLVEWFLLRKAYERNELAPNKPDEKELARRRQSYEGGYVKEPERGLWENIVYLDFRSLYPSIIITHNVSPDTLNREGCKEYDVAPQVGHRFCKDFPGFIPSLLGDLLEERQKIKKKMKATIDPIERKLLDYRQRAIKILANSYYGYYGYARARWYCKECAESVTAWGREYITMTIKEIEEKYGFKVIYSDTDGFFATIPGADAETVKKKAMEFLKYINAKLPGALELEYEGFYKRGFFVTKKKYAVIDEEGKITTRGLEIVRRDWSEIAKETQARVLEALLKDGDVEKAVRIVKEVTEKLSKYEVPPEKLVIHEQITRDLKDYKATGPHVAVAKRLAARGVKIRPGTVISYIVLKGSGRIGDRAIPFDEFDPTKHKYDAEYYIENQVLPAVERILRAFGYRKEDLRYQKTRQVGLSAWLKPKGT

SEQ ID NO: 3061 - protein, 774 aa, synthetic construct
MILDTDMITEDGKPVIRIFKKENGEFKIEYDRTFESYFYALLKDDSAIEEVKKITAERHGTVVTVKRVEKVQKKFLGRPVEVWKLYFTHPQDIPAIADKIREHPAVIDIYEYDIPFAKRYLIDKGLVPMEGDEELKMLAFDIETLYHEGEEFAEGPILMISYADEEGARVITWKNVDLPYVDVVSTEREMIKRFLRVVKEKDPDVLITYNGDNFDFAYLKKRCEKLGINFALGRDGSEPKIQRMGDRFAVEVKGRIHFDLYPVIRRTINLPTYTLEAVYEAVFGQPKEKVYAEEITTAWETGENLERVARYSMEDAKVTYELGKEFLPMEAQLSRLIGQSLWDVSRSSTGNLVEWFLLRKAYERNELAPNKPDEKELARRRQSYEGGYVKEPERGLWENIVYLDFRSLYPSIIITHNVSPDTLNREGCKEYDVAPQVGHRFCKDFPGFIPSLLGDLLEERQKIKKKMKATIDPIERKLLDYRQRAIKILANSYYGYYGYARARWYCKECAESVTAWGREYITMTIKEIEEKYGFKVIYSDTDGFFATIPGADAETVKKKAMEFLKYINAKLPGALELEYEGFYKRGFFVTKKKYAVIDEEGKITTRGLEIVRRDWSEIAKETQARVLEALLKDGDVEKAVRIVKEVTEKLSKYEVPPEKLVIHEQITRDLKDYKATGPHVAVAKRLAARGVKIRPGTVISYIVLKGSGRIGDRAIPFDEFDPTKHKYDAEYYIENQVLPAVERILRAFGYRKEDLRYQKTRQVGLSAWLKPKGT

SEQ ID NO: 3062 - protein, 774 aa, synthetic construct
MILDTDMITEDGKPVIRIFKKENGEFKIEYDRTFESYFYALLKDDSAIEEVKKITAERHGTVVTVKRVEKVQKKFLGRPVEVWKLYFTHPQDIPAIFDKIREHPAVIDIYEYDIPFAKRYLIDKGLVPMEGDEELKMLAFDIETLYHEGEEFAEGPILMISYADEEGARVITWKNVDLPYVDVVSTEREMIKRFLRVVKEKDPDVLITYNGDNFDFAYLKKRCEKLGINFALGRDGSEPKIQRMGDRFAVEVKGRIHFDLYPVIRRTINLPTYTLEAVYEAVFGQPKEKVYAEEITTAWETGENLERVARYSMEDAKVTYELGKEFLPMEAQLSRLIGQSLWDVSRSSTGNLVEWFLLRKAYERNELAPNKPDEKELARRRQSYEGGYVKEPERGLWENIVYLDFRSLYPSIIITHNVSPDTLNREGCKEYDVAPQVGHRFCKDFPGFIPSLLGDLLEERQKIKKKMKATIDPIERKLLDYRQRAIKILANSYYGYYGYARARWYCKECAESVTAWGREYITMTIKEIEEKYGFKVIYSDTDGFFATIPGADAETVKKKAMEFLKYINAKLPGALELEYEGFYKRGFFVTKKKYAVIDEEGKITTRGLEIVRRDWSEIAKETQARVLEALLKDGDVEKAVRIVKEVTEKLSKYEVPPEKLVIHEQITRDLKDYKATGPHVAVAKRLAARGVKIRPGTVISYIVLKGSGRIGDRAIPFDEFDPTKHKYDAEYYIENQVLPAVERILRAFGYRKEDLRYQKTRQVGLSAWLKPKGT

SEQ ID NO: 3063 - protein, 774 aa, synthetic construct
MILDTDMITEDGKPVIRIFKKENGEFKIEYDRTFESYFYALLKDDSAIEEVKKITAERHGTVVTVKRVEKVQKKFLGRPVEVWKLYFTHPQDIPAIHDKIREHPAVIDIYEYDIPFAKRYLIDKGLVPMEGDEELKMLAFDIETLYHEGEEFAEGPILMISYADEEGARVITWKNVDLPYVDVVSTEREMIKRFLRVVKEKDPDVLITYNGDNFDFAYLKKRCEKLGINFALGRDGSEPKIQRMGDRFAVEVKGRIHFDLYPVIRRTINLPTYTLEAVYEAVFGQPKEKVYAEEITTAWETGENLERVARYSMEDAKVTYELGKEFLPMEAQLSRLIGQSLWDVSRSSTGNLVEWFLLRKAYERNELAPNKPDEKELARRRQSYEGGYVKEPERGLWENIVYLDFRSLYPSIIITHNVSPDTLNREGCKEYDVAPQVGHRFCKDFPGFIPSLLGDLLEERQKIKKKMKATIDPIERKLLDYRQRAIKILANSYYGYYGYARARWYCKECAESVTAWGREYITMTIKEIEEKYGFKVIYSDTDGFFATIPGADAETVKKKAMEFLKYINAKLPGALELEYEGFYKRGFFVTKKKYAVIDEEGKITTRGLEIVRRDWSEIAKETQARVLEALLKDGDVEKAVRIVKEVTEKLSKYEVPPEKLVIHEQITRDLKDYKATGPHVAVAKRLAARGVKIRPGTVISYIVLKGSGRIGDRAIPFDEFDPTKHKYDAEYYIENQVLPAVERILRAFGYRKEDLRYQKTRQVGLSAWLKPKGT

SEQ ID NO: 3064 - protein, 774 aa, synthetic construct
MILDTDMITEDGKPVIRIFKKENGEFKIEYDRTFESYFYALLKDDSAIEEVKKITAERHGTVVTVKRVEKVQKKFLGRPVEVWKLYFTHPQDIPAIWDKIREHPAVIDIYEYDIPFAKRYLIDKGLVPMEGDEELKMLAFDIETLYHEGEEFAEGPILMISYADEEGARVITWKNVDLPYVDVVSTEREMIKRFLRVVKEKDPDVLITYNGDNFDFAYLKKRCEKLGINFALGRDGSEPKIQRMGDRFAVEVKGRIHFDLYPVIRRTINLPTYTLEAVYEAVFGQPKEKVYAEEITTAWETGENLERVARYSMEDAKVTYELGKEFLPMEAQLSRLIGQSLWDVSRSSTGNLVEWFLLRKAYERNELAPNKPDEKELARRRQSYEGGYVKEPERGLWENIVYLDFRSLYPSIIITHNVSPDTLNREGCKEYDVAPQVGHRFCKDFPGFIPSLLGDLLEERQKIKKKMKATIDPIERKLLDYRQRAIKILANSYYGYYGYARARWYCKECAESVTAWGREYITMTIKEIEEKYGFKVIYSDTDGFFATIPGADAETVKKKAMEFLKYINAKLPGALELEYEGFYKRGFFVTKKKYAVIDEEGKITTRGLEIVRRDWSEIAKETQARVLEALLKDGDVEKAVRIVKEVTEKLSKYEVPPEKLVIHEQITRDLKDYKATGPHVAVAKRLAARGVKIRPGTVISYIVLKGSGRIGDRAIPFDEFDPTKHKYDAEYYIENQVLPAVERILRAFGYRKEDLRYQKTRQVGLSAWLKPKGT

SEQ ID NO: 3065 - protein, 774 aa, synthetic construct
MILDTDMITEDGKPVIRIFKKENGEFKIEYDRTFESYFYALLKDDSAIEEVKKITAERHGTVVTVKRVEKVQKKFLGRPVEVWKLYFTHPQDKPAIRDKIREHPAVIDIYEYDIPFAKRYLIDKGLVPMEGDEELKMLAFDIETLYHEGEEFAEGPILMISYADEEGARVITWKNVDLPYVDVVSTEREMIKRFLRVVKEKDPDVLITYNGDNFDFAYLKKRCEKLGINFALGRDGSEPKIQRMGDRFAVEVKGRIHFDLYPVIRRTINLPTYTLEAVYEAVFGQPKEKVYAEEITTAWETGENLERVARYSMEDAKVTYELGKEFLPMEAQLSRLIGQSLWDVSRSSTGNLVEWFLLRKAYERNELAPNKPDEKELARRRQSYEGGYVKEPERGLWENIVYLDFRSLYPSIIITHNVSPDTLNREGCKEYDVAPQVGHRFCKDFPGFIPSLLGDLLEERQKIKKKMKATIDPIERKLLDYRQRAIKILANSYYGYYGYARARWYCKECAESVTAWGREYITMTIKEIEEKYGFKVIYSDTDGFFATIPGADAETVKKKAMEFLKYINAKLPGALELEYEGFYKRGFFVTKKKYAVIDEEGKITTRGLEIVRRDWSEIAKETQARVLEALLKDGDVEKAVRIVKEVTEKLSKYEVPPEKLVIHEQITRDLKDYKATGPHVAVAKRLAARGVKIRPGTVISYIVLKGSGRIGDRAIPFDEFDPTKHKYDAEYYIENQVLPAVERILRAFGYRKEDLRYQKTRQVGLSAWLKPKGT

SEQ ID NO: 3066 - protein, 774 aa, synthetic construct
MILDTDMITEDGKPVIRIFKKENGEFKIEYDRTFESYFYALLKDDSAIEEVKKITAERHGTVVTVKRVEKVQKKFLGRPVEVWKLYFTHPQDQPAIRDKIREHPAVIDIYEYDIPFAKRYLIDKGLVPMEGDEELKMLAFDIETLYHEGEEFAEGPILMISYADEEGARVITWKNVDLPYVDVVSTEREMIKRFLRVVKEKDPDVLITYNGDNFDFAYLKKRCEKLGINFALGRDGSEPKIQRMGDRFAVEVKGRIHFDLYPVIRRTINLPTYTLEAVYEAVFGQPKEKVYAEEITTAWETGENLERVARYSMEDAKVTYELGKEFLPMEAQLSRLIGQSLWDVSRSSTGNLVEWFLLRKAYERNELAPNKPDEKELARRRQSYEGGYVKEPERGLWENIVYLDFRSLYPSIIITHNVSPDTLNREGCKEYDVAPQVGHRFCKDFPGFIPSLLGDLLEERQKIKKKMKATIDPIERKLLDYRQRAIKILANSYYGYYGYARARWYCKECAESVTAWGREYITMTIKEIEEKYGFKVIYSDTDGFFATIPGADAETVKKKAMEFLKYINAKLPGALELEYEGFYKRGFFVTKKKYAVIDEEGKITTRGLEIVRRDWSEIAKETQARVLEALLKDGDVEKAVRIVKEVTEKLSKYEVPPEKLVIHEQITRDLKDYKATGPHVAVAKRLAARGVKIRPGTVISYIVLKGSGRIGDRAIPFDEFDPTKHKYDAEYYIENQVLPAVERILRAFGYRKEDLRYQKTRQVGLSAWLKPKGT

SEQ ID NO: 3067 - protein, 774 aa, synthetic construct
MILDTDMITEDGKPVIRIFKKENGEFKIEYDRTFESYFYALLKDDSAIEEVKKITAERHGTVVTVKRVEKVQKKFLGRPVEVWKLYFTHPQDQPAIADKIREHPAVIDIYEYDIPFAKRYLIDKGLVPMEGDEELKMLAFDIETLYHEGEEFAEGPILMISYADEEGARVITWKNVDLPYVDVVSTEREMIKRFLRVVKEKDPDVLITYNGDNFDFAYLKKRCEKLGINFALGRDGSEPKIQRMGDRFAVEVKGRIHFDLYPVIRRTINLPTYTLEAVYEAVFGQPKEKVYAEEITTAWETGENLERVARYSMEDAKVTYELGKEFLPMEAQLSRLIGQSLWDVSRSSTGNLVEWFLLRKAYERNELAPNKPDEKELARRRQSYEGGYVKEPERGLWENIVYLDFRSLYPSIIITHNVSPDTLNREGCKEYDVAPQVGHRFCKDFPGFIPSLLGDLLEERQKIKKKMKATIDPIERKLLDYRQRAIKILANSYYGYYGYARARWYCKECAESVTAWGREYITMTIKEIEEKYGFKVIYSDTDGFFATIPGADAETVKKKAMEFLKYINAKLPGALELEYEGFYKRGFFVTKKKYAVIDEEGKITTRGLEIVRRDWSEIAKETQARVLEALLKDGDVEKAVRIVKEVTEKLSKYEVPPEKLVIHEQITRDLKDYKATGPHVAVAKRLAARGVKIRPGTVISYIVLKGSGRIGDRAIPFDEFDPTKHKYDAEYYIENQVLPAVERILRAFGYRKEDLRYQKTRQVGLSAWLKPKGT

SEQ ID NO: 3068 - protein, 774 aa, synthetic construct
MILDTDMITEDGKPVIRIFKKENGEFKIEYDRTFESYFYALLKDDSAIEEVKKITAERHGTVVTVKRVEKVQKKFLGRPVEVWKLYFTHPQDRPAIADKIREHPAVIDIYEYDIPFAKRYLIDKGLVPMEGDEELKMLAFDIETLYHEGEEFAEGPILMISYADEEGARVITWKNVDLPYVDVVSTEREMIKRFLRVVKEKDPDVLITYNGDNFDFAYLKKRCEKLGINFALGRDGSEPKIQRMGDRFAVEVKGRIHFDLYPVIRRTINLPTYTLEAVYEAVFGQPKEKVYAEEITTAWETGENLERVARYSMEDAKVTYELGKEFLPMEAQLSRLIGQSLWDVSRSSTGNLVEWFLLRKAYERNELAPNKPDEKELARRRQSYEGGYVKEPERGLWENIVYLDFRSLYPSIIITHNVSPDTLNREGCKEYDVAPQVGHRFCKDFPGFIPSLLGDLLEERQKIKKKMKATIDPIERKLLDYRQRAIKILANSYYGYYGYARARWYCKECAESVTAWGREYITMTIKEIEEKYGFKVIYSDTDGFFATIPGADAETVKKKAMEFLKYINAKLPGALELEYEGFYKRGFFVTKKKYAVIDEEGKITTRGLEIVRRDWSEIAKETQARVLEALLKDGDVEKAVRIVKEVTEKLSKYEVPPEKLVIHEQITRDLKDYKATGPHVAVAKRLAARGVKIRPGTVISYIVLKGSGRIGDRAIPFDEFDPTKHKYDAEYYIENQVLPAVERILRAFGYRKEDLRYQKTRQVGLSAWLKPKGT

SEQ ID NO: 3069 - protein, 774 aa, synthetic construct
MILDTDMITEDGKPVIRIFKKENGEFKIEYDRTFESYFYALLKDDSAIEEVKKITAERHGTVVTVKRVEKVQKKFLGRPVEVWKLYFTHPQDRPAIFDKIREHPAVIDIYEYDIPFAKRYLIDKGLVPMEGDEELKMLAFDIETLYHEGEEFAEGPILMISYADEEGARVITWKNVDLPYVDVVSTEREMIKRFLRVVKEKDPDVLITYNGDNFDFAYLKKRCEKLGINFALGRDGSEPKIQRMGDRFAVEVKGRIHFDLYPVIRRTINLPTYTLEAVYEAVFGQPKEKVYAEEITTAWETGENLERVARYSMEDAKVTYELGKEFLPMEAQLSRLIGQSLWDVSRSSTGNLVEWFLLRKAYERNELAPNKPDEKELARRRQSYEGGYVKEPERGLWENIVYLDFRSLYPSIIITHNVSPDTLNREGCKEYDVAPQVGHRFCKDFPGFIPSLLGDLLEERQKIKKKMKATIDPIERKLLDYRQRAIKILANSYYGYYGYARARWYCKECAESVTAWGREYITMTIKEIEEKYGFKVIYSDTDGFFATIPGADAETVKKKAMEFLKYINAKLPGALELEYEGFYKRGFFVTKKKYAVIDEEGKITTRGLEIVRRDWSEIAKETQARVLEALLKDGDVEKAVRIVKEVTEKLSKYEVPPEKLVIHEQITRDLKDYKATGPHVAVAKRLAARGVKIRPGTVISYIVLKGSGRIGDRAIPFDEFDPTKHKYDAEYYIENQVLPAVERILRAFGYRKEDLRYQKTRQVGLSAWLKPKGT

SEQ ID NO: 3070 - protein, 774 aa, synthetic construct
MILDTDMITEDGKPVIRIFKKENGEFKIEYDRTFEWYFYALLKDDSAIEEVKKITAERHGTVVTVKRVEKVQKKFLGRPVEVWKLYFTHPQDVPAIRDKIREHPAVIDIYEYDIPFAKRYLIDKGLVPMEGDEELKMLAFDIETLYHEGEEFAEGPILMISYADEEGARVITWKNVDLPYVDVVSTEREMIKRFLRVVKEKDPDVLITYNGDNFDFAYLKKRCEKLGINFALGRDGSEPKIQRMGDRFAVEVKGRIHFDLYPVIRRTINLPTYTLEAVYEAVFGQPKEKVYAEEITTAWETGENLERVARYSMEDAKVTYELGKEFLPMEAQLSRLIGQSLWDVSRSSTGNLVEWFLLRKAYERNELAPNKPDEKELARRRQSYEGGYVKEPERGLWENIVYLDFRSLYPSIIITHNVSPDTLNREGCKEYDVAPQVGHRFCKDFPGFIPSLLGDLLEERQKIKKKMKATIDPIERKLLDYRQRAIKILANSYYGYYGYARARWYCKECAESVTAWGREYITMTIKEIEEKYGFKVIYSDTDGFFATIPGADAETVKKKAMEFLKYINAKLPGALELEYEGFYKRGFFVTKKKYAVIDEEGKITTRGLEIVRRDWSEIAKETQARVLEALLKDGDVEKAVRIVKEVTEKLSKYEVPPEKLVIHEQITRDLKDYKATGPHVAVAKRLAARGVKIRPGTVISYIVLKGSGRIGDRAIPFDEFDPTKHKYDAEYYIENQVLPAVERILRAFGYRKEDLRYQKTRQVGLSAWLKPKGT

SEQ ID NO: 3071 - protein, 774 aa, synthetic construct
MILDTDMITEDGKPVIRIFKKENGEFKIEYDRTFEWYFYALLKDDSAIEEVKKITAERHGTVVTVKRVEKVQKKFLGRPVEVWKLYFTHFQDVPAIRDKIREHPAVIDIYEYDIPFAKRYLIDKGLVPMEGDEELKMLAFDIETLYHEGEEFAEGPILMISYADEEGARVITWKNVDLPYVDVVSTEREMIKRFLRVVKEKDPDVLITYNGDNFDFAYLKKRCEKLGINFALGRDGSEPKIQRMGDRFAVEVKGRIHFDLYPVIRRTINLPTYTLEAVYEAVFGQPKEKVYAEEITTAWETGENLERVARYSMEDAKVTYELGKEFLPMEAQLSRLIGQSLWDVSRSSTGNLVEWFLLRKAYERNELAPNKPDEKELARRRQSYEGGYVKEPERGLWENIVYLDFRSLYPSIIITHNVSPDTLNREGCKEYDVAPQVGHRFCKDFPGFIPSLLGDLLEERQKIKKKMKATIDPIERKLLDYRQRAIKILANSYYGYYGYARARWYCKECAESVTAWGREYITMTIKEIEEKYGFKVIYSDTDGFFATIPGADAETVKKKAMEFLKYINAKLPGALELEYEGFYKRGFFVTKKKYAVIDEEGKITTRGLEIVRRDWSEIAKETQARVLEALLKDGDVEKAVRIVKEVTEKLSKYEVPPEKLVIHEQITRDLKDYKATGPHVAVAKRLAARGVKIRPGTVISYIVLKGSGRIGDRAIPFDEFDPTKHKYDAEYYIENQVLPAVERILRAFGYRKEDLRYQKTRQVGLSAWLKPKGT

SEQ ID NO: 3072 - protein, 774 aa, synthetic construct
MILDTDMITEDGKPVIRIFKKENGEFKIEYDRTFEWYFYALLKDDSAIEEVKKITAERHGTVVTVKRVEKVQKKFLGRPVEVWKLYFTHFQDVPAIADKIREHPAVIDIYEYDIPFAKRYLIDKGLVPMEGDEELKMLAFDIETLYHEGEEFAEGPILMISYADEEGARVITWKNVDLPYVDVVSTEREMIKRFLRVVKEKDPDVLITYNGDNFDFAYLKKRCEKLGINFALGRDGSEPKIQRMGDRFAVEVKGRIHFDLYPVIRRTINLPTYTLEAVYEAVFGQPKEKVYAEEITTAWETGENLERVARYSMEDAKVTYELGKEFLPMEAQLSRLIGQSLWDVSRSSTGNLVEWFLLRKAYERNELAPNKPDEKELARRRQSYEGGYVKEPERGLWENIVYLDFRSLYPSIIITHNVSPDTLNREGCKEYDVAPQVGHRFCKDFPGFIPSLLGDLLEERQKIKKKMKATIDPIERKLLDYRQRAIKILANSYYGYYGYARARWYCKECAESVTAWGREYITMTIKEIEEKYGFKVIYSDTDGFFATIPGADAETVKKKAMEFLKYINAKLPGALELEYEGFYKRGFFVTKKKYAVIDEEGKITTRGLEIVRRDWSEIAKETQARVLEALLKDGDVEKAVRIVKEVTEKLSKYEVPPEKLVIHEQITRDLKDYKATGPHVAVAKRLAARGVKIRPGTVISYIVLKGSGRIGDRAIPFDEFDPTKHKYDAEYYIENQVLPAVERILRAFGYRKEDLRYQKTRQVGLSAWLKPKGT

SEQ ID NO: 3073 - protein, 774 aa, synthetic construct
MILDTDMITEDGKPVIRIFKKENGEFKIEYDRTFEWYFYALLKDDSAIEEVKKITAERHGTVVTVKRVEKVQKKFLGRPVEVWKLYFTHFQDVPAIHDKIREHPAVIDIYEYDIPFAKRYLIDKGLVPMEGDEELKMLAFDIETLYHEGEEFAEGPILMISYADEEGARVITWKNVDLPYVDVVSTEREMIKRFLRVVKEKDPDVLITYNGDNFDFAYLKKRCEKLGINFALGRDGSEPKIQRMGDRFAVEVKGRIHFDLYPVIRRTINLPTYTLEAVYEAVFGQPKEKVYAEEITTAWETGENLERVARYSMEDAKVTYELGKEFLPMEAQLSRLIGQSLWDVSRSSTGNLVEWFLLRKAYERNELAPNKPDEKELARRRQSYEGGYVKEPERGLWENIVYLDFRSLYPSIIITHNVSPDTLNREGCKEYDVAPQVGHRFCKDFPGFIPSLLGDLLEERQKIKKKMKATIDPIERKLLDYRQRAIKILANSYYGYYGYARARWYCKECAESVTAWGREYITMTIKEIEEKYGFKVIYSDTDGFFATIPGADAETVKKKAMEFLKYINAKLPGALELEYEGFYKRGFFVTKKKYAVIDEEGKITTRGLEIVRRDWSEIAKETQARVLEALLKDGDVEKAVRIVKEVTEKLSKYEVPPEKLVIHEQITRDLKDYKATGPHVAVAKRLAARGVKIRPGTVISYIVLKGSGRIGDRAIPFDEFDPTKHKYDAEYYIENQVLPAVERILRAFGYRKEDLRYQKTRQVGLSAWLKPKGT

SEQ ID NO: 3074 - protein, 774 aa, synthetic construct
MILDTDMITEDGKPVIRIFKKENGEFKIEYDRTFEWYFYALLKDDSAIEEVKKITAERHGTVVTVKRVEKVQKKFLGRPVEVWKLYFTHFQDIPAIRDKIREHPAVIDIYEYDIPFAKRYLIDKGLVPMEGDEELKMLAFDIETLYHEGEEFAEGPILMISYADEEGARVITWKNVDLPYVDVVSTEREMIKRFLRVVKEKDPDVLITYNGDNFDFAYLKKRCEKLGINFALGRDGSEPKIQRMGDRFAVEVKGRIHFDLYPVIRRTINLPTYTLEAVYEAVFGQPKEKVYAEEITTAWETGENLERVARYSMEDAKVTYELGKEFLPMEAQLSRLIGQSLWDVSRSSTGNLVEWFLLRKAYERNELAPNKPDEKELARRRQSYEGGYVKEPERGLWENIVYLDFRSLYPSIIITHNVSPDTLNREGCKEYDVAPQVGHRFCKDFPGFIPSLLGDLLEERQKIKKKMKATIDPIERKLLDYRQRAIKILANSYYGYYGYARARWYCKECAESVTAWGREYITMTIKEIEEKYGFKVIYSDTDGFFATIPGADAETVKKKAMEFLKYINAKLPGALELEYEGFYKRGFFVTKKKYAVIDEEGKITTRGLEIVRRDWSEIAKETQARVLEALLKDGDVEKAVRIVKEVTEKLSKYEVPPEKLVIHEQITRDLKDYKATGPHVAVAKRLAARGVKIRPGTVISYIVLKGSGRIGDRAIPFDEFDPTKHKYDAEYYIENQVLPAVERILRAFGYRKEDLRYQKTRQVGLSAWLKPKGT

SEQ ID NO: 3075 - protein, 774 aa, synthetic construct
MILDTDMITEDGKPVIRIFKKENGEFKIEYDRTFEWYFYALLKDDSAIEEVKKITAERHGTVVTVKRVEKVQKKFLGRPVEVWKLYFTHFQDIPAIADKIREHPAVIDIYEYDIPFAKRYLIDKGLVPMEGDEELKMLAFDIETLYHEGEEFAEGPILMISYADEEGARVITWKNVDLPYVDVVSTEREMIKRFLRVVKEKDPDVLITYNGDNFDFAYLKKRCEKLGINFALGRDGSEPKIQRMGDRFAVEVKGRIHFDLYPVIRRTINLPTYTLEAVYEAVFGQPKEKVYAEEITTAWETGENLERVARYSMEDAKVTYELGKEFLPMEAQLSRLIGQSLWDVSRSSTGNLVEWFLLRKAYERNELAPNKPDEKELARRRQSYEGGYVKEPERGLWENIVYLDFRSLYPSIIITHNVSPDTLNREGCKEYDVAPQVGHRFCKDFPGFIPSLLGDLLEERQKIKKKMKATIDPIERKLLDYRQRAIKILANSYYGYYGYARARWYCKECAESVTAWGREYITMTIKEIEEKYGFKVIYSDTDGFFATIPGADAETVKKKAMEFLKYINAKLPGALELEYEGFYKRGFFVTKKKYAVIDEEGKITTRGLEIVRRDWSEIAKETQARVLEALLKDGDVEKAVRIVKEVTEKLSKYEVPPEKLVIHEQITRDLKDYKATGPHVAVAKRLAARGVKIRPGTVISYIVLKGSGRIGDRAIPFDEFDPTKHKYDAEYYIENQVLPAVERILRAFGYRKEDLRYQKTRQVGLSAWLKPKGT

SEQ ID NO: 3076 - protein, 774 aa, synthetic construct
MILDTDMITEDGKPVIRIFKKENGEFKIEYDRTFEWYFYALLKDDSAIEEVKKITAERHGTVVTVKRVEKVQKKFLGRPVEVWKLYFTHFQDIPAIFDKIREHPAVIDIYEYDIPFAKRYLIDKGLVPMEGDEELKMLAFDIETLYHEGEEFAEGPILMISYADEEGARVITWKNVDLPYVDVVSTEREMIKRFLRVVKEKDPDVLITYNGDNFDFAYLKKRCEKLGINFALGRDGSEPKIQRMGDRFAVEVKGRIHFDLYPVIRRTINLPTYTLEAVYEAVFGQPKEKVYAEEITTAWETGENLERVARYSMEDAKVTYELGKEFLPMEAQLSRLIGQSLWDVSRSSTGNLVEWFLLRKAYERNELAPNKPDEKELARRRQSYEGGYVKEPERGLWENIVYLDFRSLYPSIIITHNVSPDTLNREGCKEYDVAPQVGHRFCKDFPGFIPSLLGDLLEERQKIKKKMKATIDPIERKLLDYRQRAIKILANSYYGYYGYARARWYCKECAESVTAWGREYITMTIKEIEEKYGFKVIYSDTDGFFATIPGADAETVKKKAMEFLKYINAKLPGALELEYEGFYKRGFFVTKKKYAVIDEEGKITTRGLEIVRRDWSEIAKETQARVLEALLKDGDVEKAVRIVKEVTEKLSKYEVPPEKLVIHEQITRDLKDYKATGPHVAVAKRLAARGVKIRPGTVISYIVLKGSGRIGDRAIPFDEFDPTKHKYDAEYYIENQVLPAVERILRAFGYRKEDLRYQKTRQVGLSAWLKPKGT

SEQ ID NO: 3077 - protein, 774 aa, synthetic construct
MILDTDMITEDGKPVIRIFKKENGEFKIEYDRTFEWYFYALLKDDSAIEEVKKITAERHGTVVTVKRVEKVQKKFLGRPVEVWKLYFTHFQDIPAIHDKIREHPAVIDIYEYDIPFAKRYLIDKGLVPMEGDEELKMLAFDIETLYHEGEEFAEGPILMISYADEEGARVITWKNVDLPYVDVVSTEREMIKRFLRVVKEKDPDVLITYNGDNFDFAYLKKRCEKLGINFALGRDGSEPKIQRMGDRFAVEVKGRIHFDLYPVIRRTINLPTYTLEAVYEAVFGQPKEKVYAEEITTAWETGENLERVARYSMEDAKVTYELGKEFLPMEAQLSRLIGQSLWDVSRSSTGNLVEWFLLRKAYERNELAPNKPDEKELARRRQSYEGGYVKEPERGLWENIVYLDFRSLYPSIIITHNVSPDTLNREGCKEYDVAPQVGHRFCKDFPGFIPSLLGDLLEERQKIKKKMKATIDPIERKLLDYRQRAIKILANSYYGYYGYARARWYCKECAESVTAWGREYITMTIKEIEEKYGFKVIYSDTDGFFATIPGADAETVKKKAMEFLKYINAKLPGALELEYEGFYKRGFFVTKKKYAVIDEEGKITTRGLEIVRRDWSEIAKETQARVLEALLKDGDVEKAVRIVKEVTEKLSKYEVPPEKLVIHEQITRDLKDYKATGPHVAVAKRLAARGVKIRPGTVISYIVLKGSGRIGDRAIPFDEFDPTKHKYDAEYYIENQVLPAVERILRAFGYRKEDLRYQKTRQVGLSAWLKPKGT

SEQ ID NO: 3078 - protein, 774 aa, synthetic construct
MILDTDMITEDGKPVIRIFKKENGEFKIEYDRTFEWYFYALLKDDSAIEEVKKITAERHGTVVTVKRVEKVQKKFLGRPVEVWKLYFTHFQDIPAIWDKIREHPAVIDIYEYDIPFAKRYLIDKGLVPMEGDEELKMLAFDIETLYHEGEEFAEGPILMISYADEEGARVITWKNVDLPYVDVVSTEREMIKRFLRVVKEKDPDVLITYNGDNFDFAYLKKRCEKLGINFALGRDGSEPKIQRMGDRFAVEVKGRIHFDLYPVIRRTINLPTYTLEAVYEAVFGQPKEKVYAEEITTAWETGENLERVARYSMEDAKVTYELGKEFLPMEAQLSRLIGQSLWDVSRSSTGNLVEWFLLRKAYERNELAPNKPDEKELARRRQSYEGGYVKEPERGLWENIVYLDFRSLYPSIIITHNVSPDTLNREGCKEYDVAPQVGHRFCKDFPGFIPSLLGDLLEERQKIKKKMKATIDPIERKLLDYRQRAIKILANSYYGYYGYARARWYCKECAESVTAWGREYITMTIKEIEEKYGFKVIYSDTDGFFATIPGADAETVKKKAMEFLKYINAKLPGALELEYEGFYKRGFFVTKKKYAVIDEEGKITTRGLEIVRRDWSEIAKETQARVLEALLKDGDVEKAVRIVKEVTEKLSKYEVPPEKLVIHEQITRDLKDYKATGPHVAVAKRLAARGVKIRPGTVISYIVLKGSGRIGDRAIPFDEFDPTKHKYDAEYYIENQVLPAVERILRAFGYRKEDLRYQKTRQVGLSAWLKPKGT

SEQ ID NO: 3079 - protein, 774 aa, synthetic construct
MILDTDMITEDGKPVIRIFKKENGEFKIEYDRTFEWYFYALLKDDSAIEEVKKITAERHGTVVTVKRVEKVQKKFLGRPVEVWKLYFTHIQDVPAIRDKIREHPAVIDIYEYDIPFAKRYLIDKGLVPMEGDEELKMLAFDIETLYHEGEEFAEGPILMISYADEEGARVITWKNVDLPYVDVVSTEREMIKRFLRVVKEKDPDVLITYNGDNFDFAYLKKRCEKLGINFALGRDGSEPKIQRMGDRFAVEVKGRIHFDLYPVIRRTINLPTYTLEAVYEAVFGQPKEKVYAEEITTAWETGENLERVARYSMEDAKVTYELGKEFLPMEAQLSRLIGQSLWDVSRSSTGNLVEWFLLRKAYERNELAPNKPDEKELARRRQSYEGGYVKEPERGLWENIVYLDFRSLYPSIIITHNVSPDTLNREGCKEYDVAPQVGHRFCKDFPGFIPSLLGDLLEERQKIKKKMKATIDPIERKLLDYRQRAIKILANSYYGYYGYARARWYCKECAESVTAWGREYITMTIKEIEEKYGFKVIYSDTDGFFATIPGADAETVKKKAMEFLKYINAKLPGALELEYEGFYKRGFFVTKKKYAVIDEEGKITTRGLEIVRRDWSEIAKETQARVLEALLKDGDVEKAVRIVKEVTEKLSKYEVPPEKLVIHEQITRDLKDYKATGPHVAVAKRLAARGVKIRPGTVISYIVLKGSGRIGDRAIPFDEFDPTKHKYDAEYYIENQVLPAVERILRAFGYRKEDLRYQKTRQVGLSAWLKPKGT

SEQ ID NO: 3080 - protein, 774 aa, synthetic construct
MILDTDMITEDGKPVIRIFKKENGEFKIEYDRTFEWYFYALLKDDSAIEEVKKITAERHGTVVTVKRVEKVQKKFLGRPVEVWKLYFTHIQDIPAIRDKIREHPAVIDIYEYDIPFAKRYLIDKGLVPMEGDEELKMLAFDIETLYHEGEEFAEGPILMISYADEEGARVITWKNVDLPYVDVVSTEREMIKRFLRVVKEKDPDVLITYNGDNFDFAYLKKRCEKLGINFALGRDGSEPKIQRMGDRFAVEVKGRIHFDLYPVIRRTINLPTYTLEAVYEAVFGQPKEKVYAEEITTAWETGENLERVARYSMEDAKVTYELGKEFLPMEAQLSRLIGQSLWDVSRSSTGNLVEWFLLRKAYERNELAPNKPDEKELARRRQSYEGGYVKEPERGLWENIVYLDFRSLYPSIIITHNVSPDTLNREGCKEYDVAPQVGHRFCKDFPGFIPSLLGDLLEERQKIKKKMKATIDPIERKLLDYRQRAIKILANSYYGYYGYARARWYCKECAESVTAWGREYITMTIKEIEEKYGFKVIYSDTDGFFATIPGADAETVKKKAMEFLKYINAKLPGALELEYEGFYKRGFFVTKKKYAVIDEEGKITTRGLEIVRRDWSEIAKETQARVLEALLKDGDVEKAVRIVKEVTEKLSKYEVPPEKLVIHEQITRDLKDYKATGPHVAVAKRLAARGVKIRPGTVISYIVLKGSGRIGDRAIPFDEFDPTKHKYDAEYYIENQVLPAVERILRAFGYRKEDLRYQKTRQVGLSAWLKPKGT

SEQ ID NO: 3081 - protein, 774 aa, synthetic construct
MILDTDMITEDGKPVIRIFKKENGEFKIEYDRTFEWYFYALLKDDSAIEEVKKITAERHGTVVTVKRVEKVQKKFLGRPVEVWKLYFTHIQDIPAIADKIREHPAVIDIYEYDIPFAKRYLIDKGLVPMEGDEELKMLAFDIETLYHEGEEFAEGPILMISYADEEGARVITWKNVDLPYVDVVSTEREMIKRFLRVVKEKDPDVLITYNGDNFDFAYLKKRCEKLGINFALGRDGSEPKIQRMGDRFAVEVKGRIHFDLYPVIRRTINLPTYTLEAVYEAVFGQPKEKVYAEEITTAWETGENLERVARYSMEDAKVTYELGKEFLPMEAQLSRLIGQSLWDVSRSSTGNLVEWFLLRKAYERNELAPNKPDEKELARRRQSYEGGYVKEPERGLWENIVYLDFRSLYPSIIITHNVSPDTLNREGCKEYDVAPQVGHRFCKDFPGFIPSLLGDLLEERQKIKKKMKATIDPIERKLLDYRQRAIKILANSYYGYYGYARARWYCKECAESVTAWGREYITMTIKEIEEKYGFKVIYSDTDGFFATIPGADAETVKKKAMEFLKYINAKLPGALELEYEGFYKRGFFVTKKKYAVIDEEGKITTRGLEIVRRDWSEIAKETQARVLEALLKDGDVEKAVRIVKEVTEKLSKYEVPPEKLVIHEQITRDLKDYKATGPHVAVAKRLAARGVKIRPGTVISYIVLKGSGRIGDRAIPFDEFDPTKHKYDAEYYIENQVLPAVERILRAFGYRKEDLRYQKTRQVGLSAWLKPKGT

SEQ ID NO: 3082 - protein, 774 aa, synthetic construct
MILDTDMITEDGKPVIRIFKKENGEFKIEYDRTFEWYFYALLKDDSAIEEVKKITAERHGTVVTVKRVEKVQKKFLGRPVEVWKLYFTHIQDRPAIRDKIREHPAVIDIYEYDIPFAKRYLIDKGLVPMEGDEELKMLAFDIETLYHEGEEFAEGPILMISYADEEGARVITWKNVDLPYVDVVSTEREMIKRFLRVVKEKDPDVLITYNGDNFDFAYLKKRCEKLGINFALGRDGSEPKIQRMGDRFAVEVKGRIHFDLYPVIRRTINLPTYTLEAVYEAVFGQPKEKVYAEEITTAWETGENLERVARYSMEDAKVTYELGKEFLPMEAQLSRLIGQSLWDVSRSSTGNLVEWFLLRKAYERNELAPNKPDEKELARRRQSYEGGYVKEPERGLWENIVYLDFRSLYPSIIITHNVSPDTLNREGCKEYDVAPQVGHRFCKDFPGFIPSLLGDLLEERQKIKKKMKATIDPIERKLLDYRQRAIKILANSYYGYYGYARARWYCKECAESVTAWGREYITMTIKEIEEKYGFKVIYSDTDGFFATIPGADAETVKKKAMEFLKYINAKLPGALELEYEGFYKRGFFVTKKKYAVIDEEGKITTRGLEIVRRDWSEIAKETQARVLEALLKDGDVEKAVRIVKEVTEKLSKYEVPPEKLVIHEQITRDLKDYKATGPHVAVAKRLAARGVKIRPGTVISYIVLKGSGRIGDRAIPFDEFDPTKHKYDAEYYIENQVLPAVERILRAFGYRKEDLRYQKTRQVGLSAWLKPKGT

SEQ ID NO: 3083 - protein, 774 aa, synthetic construct
MILDTDMITEDGKPVIRIFKKENGEFKIEYDRTFEWYFYALLKDDSAIEEVKKITAERHGTVVTVKRVEKVQKKFLGRPVEVWKLYFTHSQDVPAIRDKIREHPAVIDIYEYDIPFAKRYLIDKGLVPMEGDEELKMLAFDIETLYHEGEEFAEGPILMISYADEEGARVITWKNVDLPYVDVVSTEREMIKRFLRVVKEKDPDVLITYNGDNFDFAYLKKRCEKLGINFALGRDGSEPKIQRMGDRFAVEVKGRIHFDLYPVIRRTINLPTYTLEAVYEAVFGQPKEKVYAEEITTAWETGENLERVARYSMEDAKVTYELGKEFLPMEAQLSRLIGQSLWDVSRSSTGNLVEWFLLRKAYERNELAPNKPDEKELARRRQSYEGGYVKEPERGLWENIVYLDFRSLYPSIIITHNVSPDTLNREGCKEYDVAPQVGHRFCKDFPGFIPSLLGDLLEERQKIKKKMKATIDPIERKLLDYRQRAIKILANSYYGYYGYARARWYCKECAESVTAWGREYITMTIKEIEEKYGFKVIYSDTDGFFATIPGADAETVKKKAMEFLKYINAKLPGALELEYEGFYKRGFFVTKKKYAVIDEEGKITTRGLEIVRRDWSEIAKETQARVLEALLKDGDVEKAVRIVKEVTEKLSKYEVPPEKLVIHEQITRDLKDYKATGPHVAVAKRLAARGVKIRPGTVISYIVLKGSGRIGDRAIPFDEFDPTKHKYDAEYYIENQVLPAVERILRAFGYRKEDLRYQKTRQVGLSAWLKPKGT

SEQ ID NO: 3084 - protein, 774 aa, synthetic construct
MILDTDMITEDGKPVIRIFKKENGEFKIEYDRTFEWYFYALLKDDSAIEEVKKITAERHGTVVTVKRVEKVQKKFLGRPVEVWKLYFTHSQDIPAIADKIREHPAVIDIYEYDIPFAKRYLIDKGLVPMEGDEELKMLAFDIETLYHEGEEFAEGPILMISYADEEGARVITWKNVDLPYVDVVSTEREMIKRFLRVVKEKDPDVLITYNGDNFDFAYLKKRCEKLGINFALGRDGSEPKIQRMGDRFAVEVKGRIHFDLYPVIRRTINLPTYTLEAVYEAVFGQPKEKVYAEEITTAWETGENLERVARYSMEDAKVTYELGKEFLPMEAQLSRLIGQSLWDVSRSSTGNLVEWFLLRKAYERNELAPNKPDEKELARRRQSYEGGYVKEPERGLWENIVYLDFRSLYPSIIITHNVSPDTLNREGCKEYDVAPQVGHRFCKDFPGFIPSLLGDLLEERQKIKKKMKATIDPIERKLLDYRQRAIKILANSYYGYYGYARARWYCKECAESVTAWGREYITMTIKEIEEKYGFKVIYSDTDGFFATIPGADAETVKKKAMEFLKYINAKLPGALELEYEGFYKRGFFVTKKKYAVIDEEGKITTRGLEIVRRDWSEIAKETQARVLEALLKDGDVEKAVRIVKEVTEKLSKYEVPPEKLVIHEQITRDLKDYKATGPHVAVAKRLAARGVKIRPGTVISYIVLKGSGRIGDRAIPFDEFDPTKHKYDAEYYIENQVLPAVERILRAFGYRKEDLRYQKTRQVGLSAWLKPKGT

SEQ ID NO: 3085 - protein, 774 aa, synthetic construct
MILDTDMITEDGKPVIRIFKKENGEFKIEYDRTFEWYFYALLKDDSAIEEVKKITAERHGTVVTVKRVEKVQKKFLGRPVEVWKLYFTHWQDVPAIRDKIREHPAVIDIYEYDIPFAKRYLIDKGLVPMEGDEELKMLAFDIETLYHEGEEFAEGPILMISYADEEGARVITWKNVDLPYVDVVSTEREMIKRFLRVVKEKDPDVLITYNGDNFDFAYLKKRCEKLGINFALGRDGSEPKIQRMGDRFAVEVKGRIHFDLYPVIRRTINLPTYTLEAVYEAVFGQPKEKVYAEEITTAWETGENLERVARYSMEDAKVTYELGKEFLPMEAQLSRLIGQSLWDVSRSSTGNLVEWFLLRKAYERNELAPNKPDEKELARRRQSYEGGYVKEPERGLWENIVYLDFRSLYPSIIITHNVSPDTLNREGCKEYDVAPQVGHRFCKDFPGFIPSLLGDLLEERQKIKKKMKATIDPIERKLLDYRQRAIKILANSYYGYYGYARARWYCKECAESVTAWGREYITMTIKEIEEKYGFKVIYSDTDGFFATIPGADAETVKKKAMEFLKYINAKLPGALELEYEGFYKRGFFVTKKKYAVIDEEGKITTRGLEIVRRDWSEIAKETQARVLEALLKDGDVEKAVRIVKEVTEKLSKYEVPPEKLVIHEQITRDLKDYKATGPHVAVAKRLAARGVKIRPGTVISYIVLKGSGRIGDRAIPFDEFDPTKHKYDAEYYIENQVLPAVERILRAFGYRKEDLRYQKTRQVGLSAWLKPKGT

SEQ ID NO: 3086 - protein, 774 aa, synthetic construct
MILDTDMITEDGKPVIRIFKKENGEFKIEYDRTFEWYFYALLKDDSAIEEVKKITAERHGTVVTVKRVEKVQKKFLGRPVEVWKLYFTHWQDVPAIADKIREHPAVIDIYEYDIPFAKRYLIDKGLVPMEGDEELKMLAFDIETLYHEGEEFAEGPILMISYADEEGARVITWKNVDLPYVDVVSTEREMIKRFLRVVKEKDPDVLITYNGDNFDFAYLKKRCEKLGINFALGRDGSEPKIQRMGDRFAVEVKGRIHFDLYPVIRRTINLPTYTLEAVYEAVFGQPKEKVYAEEITTAWETGENLERVARYSMEDAKVTYELGKEFLPMEAQLSRLIGQSLWDVSRSSTGNLVEWFLLRKAYERNELAPNKPDEKELARRRQSYEGGYVKEPERGLWENIVYLDFRSLYPSIIITHNVSPDTLNREGCKEYDVAPQVGHRFCKDFPGFIPSLLGDLLEERQKIKKKMKATIDPIERKLLDYRQRAIKILANSYYGYYGYARARWYCKECAESVTAWGREYITMTIKEIEEKYGFKVIYSDTDGFFATIPGADAETVKKKAMEFLKYINAKLPGALELEYEGFYKRGFFVTKKKYAVIDEEGKITTRGLEIVRRDWSEIAKETQARVLEALLKDGDVEKAVRIVKEVTEKLSKYEVPPEKLVIHEQITRDLKDYKATGPHVAVAKRLAARGVKIRPGTVISYIVLKGSGRIGDRAIPFDEFDPTKHKYDAEYYIENQVLPAVERILRAFGYRKEDLRYQKTRQVGLSAWLKPKGT

SEQ ID NO: 3087 - protein, 774 aa, synthetic construct
MILDTDMITEDGKPVIRIFKKENGEFKIEYDRTFEWYFYALLKDDSAIEEVKKITAERHGTVVTVKRVEKVQKKFLGRPVEVWKLYFTHWQDIPAIRDKIREHPAVIDIYEYDIPFAKRYLIDKGLVPMEGDEELKMLAFDIETLYHEGEEFAEGPILMISYADEEGARVITWKNVDLPYVDVVSTEREMIKRFLRVVKEKDPDVLITYNGDNFDFAYLKKRCEKLGINFALGRDGSEPKIQRMGDRFAVEVKGRIHFDLYPVIRRTINLPTYTLEAVYEAVFGQPKEKVYAEEITTAWETGENLERVARYSMEDAKVTYELGKEFLPMEAQLSRLIGQSLWDVSRSSTGNLVEWFLLRKAYERNELAPNKPDEKELARRRQSYEGGYVKEPERGLWENIVYLDFRSLYPSIIITHNVSPDTLNREGCKEYDVAPQVGHRFCKDFPGFIPSLLGDLLEERQKIKKKMKATIDPIERKLLDYRQRAIKILANSYYGYYGYARARWYCKECAESVTAWGREYITMTIKEIEEKYGFKVIYSDTDGFFATIPGADAETVKKKAMEFLKYINAKLPGALELEYEGFYKRGFFVTKKKYAVIDEEGKITTRGLEIVRRDWSEIAKETQARVLEALLKDGDVEKAVRIVKEVTEKLSKYEVPPEKLVIHEQITRDLKDYKATGPHVAVAKRLAARGVKIRPGTVISYIVLKGSGRIGDRAIPFDEFDPTKHKYDAEYYIENQVLPAVERILRAFGYRKEDLRYQKTRQVGLSAWLKPKGT

SEQ ID NO: 3088 - protein, 774 aa, synthetic construct
MILDTDMITEDGKPVIRIFKKENGEFKIEYDRTFEWYFYALLKDDSAIEEVKKITAERHGTVVTVKRVEKVQKKFLGRPVEVWKLYFTHWQDIPAIADKIREHPAVIDIYEYDIPFAKRYLIDKGLVPMEGDEELKMLAFDIETLYHEGEEFAEGPILMISYADEEGARVITWKNVDLPYVDVVSTEREMIKRFLRVVKEKDPDVLITYNGDNFDFAYLKKRCEKLGINFALGRDGSEPKIQRMGDRFAVEVKGRIHFDLYPVIRRTINLPTYTLEAVYEAVFGQPKEKVYAEEITTAWETGENLERVARYSMEDAKVTYELGKEFLPMEAQLSRLIGQSLWDVSRSSTGNLVEWFLLRKAYERNELAPNKPDEKELARRRQSYEGGYVKEPERGLWENIVYLDFRSLYPSIIITHNVSPDTLNREGCKEYDVAPQVGHRFCKDFPGFIPSLLGDLLEERQKIKKKMKATIDPIERKLLDYRQRAIKILANSYYGYYGYARARWYCKECAESVTAWGREYITMTIKEIEEKYGFKVIYSDTDGFFATIPGADAETVKKKAMEFLKYINAKLPGALELEYEGFYKRGFFVTKKKYAVIDEEGKITTRGLEIVRRDWSEIAKETQARVLEALLKDGDVEKAVRIVKEVTEKLSKYEVPPEKLVIHEQITRDLKDYKATGPHVAVAKRLAARGVKIRPGTVISYIVLKGSGRIGDRAIPFDEFDPTKHKYDAEYYIENQVLPAVERILRAFGYRKEDLRYQKTRQVGLSAWLKPKGT

SEQ ID NO: 3089 - protein, 774 aa, synthetic construct
MILDTDMITEDGKPVIRIFKKENGEFKIEYDRTFEWYFYALLKDDSAIEEVKKITAERHGTVVTVKRVEKVQKKFLGRPVEVWKLYFTHWQDIPAIFDKIREHPAVIDIYEYDIPFAKRYLIDKGLVPMEGDEELKMLAFDIETLYHEGEEFAEGPILMISYADEEGARVITWKNVDLPYVDVVSTEREMIKRFLRVVKEKDPDVLITYNGDNFDFAYLKKRCEKLGINFALGRDGSEPKIQRMGDRFAVEVKGRIHFDLYPVIRRTINLPTYTLEAVYEAVFGQPKEKVYAEEITTAWETGENLERVARYSMEDAKVTYELGKEFLPMEAQLSRLIGQSLWDVSRSSTGNLVEWFLLRKAYERNELAPNKPDEKELARRRQSYEGGYVKEPERGLWENIVYLDFRSLYPSIIITHNVSPDTLNREGCKEYDVAPQVGHRFCKDFPGFIPSLLGDLLEERQKIKKKMKATIDPIERKLLDYRQRAIKILANSYYGYYGYARARWYCKECAESVTAWGREYITMTIKEIEEKYGFKVIYSDTDGFFATIPGADAETVKKKAMEFLKYINAKLPGALELEYEGFYKRGFFVTKKKYAVIDEEGKITTRGLEIVRRDWSEIAKETQARVLEALLKDGDVEKAVRIVKEVTEKLSKYEVPPEKLVIHEQITRDLKDYKATGPHVAVAKRLAARGVKIRPGTVISYIVLKGSGRIGDRAIPFDEFDPTKHKYDAEYYIENQVLPAVERILRAFGYRKEDLRYQKTRQVGLSAWLKPKGT

SEQ ID NO: 3090 - protein, 774 aa, synthetic construct
MILDTDMITEDGKPVIRIFKKENGEFKIEYDRTFEWYFYALLKDDSAIEEVKKITAERHGTVVTVKRVEKVQKKFLGRPVEVWKLYFTHWQDIPAIHDKIREHPAVIDIYEYDIPFAKRYLIDKGLVPMEGDEELKMLAFDIETLYHEGEEFAEGPILMISYADEEGARVITWKNVDLPYVDVVSTEREMIKRFLRVVKEKDPDVLITYNGDNFDFAYLKKRCEKLGINFALGRDGSEPKIQRMGDRFAVEVKGRIHFDLYPVIRRTINLPTYTLEAVYEAVFGQPKEKVYAEEITTAWETGENLERVARYSMEDAKVTYELGKEFLPMEAQLSRLIGQSLWDVSRSSTGNLVEWFLLRKAYERNELAPNKPDEKELARRRQSYEGGYVKEPERGLWENIVYLDFRSLYPSIIITHNVSPDTLNREGCKEYDVAPQVGHRFCKDFPGFIPSLLGDLLEERQKIKKKMKATIDPIERKLLDYRQRAIKILANSYYGYYGYARARWYCKECAESVTAWGREYITMTIKEIEEKYGFKVIYSDTDGFFATIPGADAETVKKKAMEFLKYINAKLPGALELEYEGFYKRGFFVTKKKYAVIDEEGKITTRGLEIVRRDWSEIAKETQARVLEALLKDGDVEKAVRIVKEVTEKLSKYEVPPEKLVIHEQITRDLKDYKATGPHVAVAKRLAARGVKIRPGTVISYIVLKGSGRIGDRAIPFDEFDPTKHKYDAEYYIENQVLPAVERILRAFGYRKEDLRYQKTRQVGLSAWLKPKGT

SEQ ID NO: 3091 - protein, 774 aa, synthetic construct
MILDTDMITEDGKPVIRIFKKENGEFKIEYDRTFEWYFYALLKDDSAIEEVKKITAERHGTVVTVKRVEKVQKKFLGRPVEVWKLYFTHYQDVPAIRDKIREHPAVIDIYEYDIPFAKRYLIDKGLVPMEGDEELKMLAFDIETLYHEGEEFAEGPILMISYADEEGARVITWKNVDLPYVDVVSTEREMIKRFLRVVKEKDPDVLITYNGDNFDFAYLKKRCEKLGINFALGRDGSEPKIQRMGDRFAVEVKGRIHFDLYPVIRRTINLPTYTLEAVYEAVFGQPKEKVYAEEITTAWETGENLERVARYSMEDAKVTYELGKEFLPMEAQLSRLIGQSLWDVSRSSTGNLVEWFLLRKAYERNELAPNKPDEKELARRRQSYEGGYVKEPERGLWENIVYLDFRSLYPSIIITHNVSPDTLNREGCKEYDVAPQVGHRFCKDFPGFIPSLLGDLLEERQKIKKKMKATIDPIERKLLDYRQRAIKILANSYYGYYGYARARWYCKECAESVTAWGREYITMTIKEIEEKYGFKVIYSDTDGFFATIPGADAETVKKKAMEFLKYINAKLPGALELEYEGFYKRGFFVTKKKYAVIDEEGKITTRGLEIVRRDWSEIAKETQARVLEALLKDGDVEKAVRIVKEVTEKLSKYEVPPEKLVIHEQITRDLKDYKATGPHVAVAKRLAARGVKIRPGTVISYIVLKGSGRIGDRAIPFDEFDPTKHKYDAEYYIENQVLPAVERILRAFGYRKEDLRYQKTRQVGLSAWLKPKGT

SEQ ID NO: 3092 - protein, 774 aa, synthetic construct
MILDTDMITEDGKPVIRIFKKENGEFKIEYDRTFEWYFYALLKDDSAIEEVKKITAERHGTVVTVKRVEKVQKKFLGRPVEVWKLYFTHYQDIPAIRDKIREHPAVIDIYEYDIPFAKRYLIDKGLVPMEGDEELKMLAFDIETLYHEGEEFAEGPILMISYADEEGARVITWKNVDLPYVDVVSTEREMIKRFLRVVKEKDPDVLITYNGDNFDFAYLKKRCEKLGINFALGRDGSEPKIQRMGDRFAVEVKGRIHFDLYPVIRRTINLPTYTLEAVYEAVFGQPKEKVYAEEITTAWETGENLERVARYSMEDAKVTYELGKEFLPMEAQLSRLIGQSLWDVSRSSTGNLVEWFLLRKAYERNELAPNKPDEKELARRRQSYEGGYVKEPERGLWENIVYLDFRSLYPSIIITHNVSPDTLNREGCKEYDVAPQVGHRFCKDFPGFIPSLLGDLLEERQKIKKKMKATIDPIERKLLDYRQRAIKILANSYYGYYGYARARWYCKECAESVTAWGREYITMTIKEIEEKYGFKVIYSDTDGFFATIPGADAETVKKKAMEFLKYINAKLPGALELEYEGFYKRGFFVTKKKYAVIDEEGKITTRGLEIVRRDWSEIAKETQARVLEALLKDGDVEKAVRIVKEVTEKLSKYEVPPEKLVIHEQITRDLKDYKATGPHVAVAKRLAARGVKIRPGTVISYIVLKGSGRIGDRAIPFDEFDPTKHKYDAEYYIENQVLPAVERILRAFGYRKEDLRYQKTRQVGLSAWLKPKGT

SEQ ID NO: 3093 - protein, 774 aa, synthetic construct
MILDTDMITEDGKPVIRIFKKENGEFKIEYDRTFEWYFYALLKDDSAIEEVKKITAERHGTVVTVKRVEKVQKKFLGRPVEVWKLYFTHYQDIPAIADKIREHPAVIDIYEYDIPFAKRYLIDKGLVPMEGDEELKMLAFDIETLYHEGEEFAEGPILMISYADEEGARVITWKNVDLPYVDVVSTEREMIKRFLRVVKEKDPDVLITYNGDNFDFAYLKKRCEKLGINFALGRDGSEPKIQRMGDRFAVEVKGRIHFDLYPVIRRTINLPTYTLEAVYEAVFGQPKEKVYAEEITTAWETGENLERVARYSMEDAKVTYELGKEFLPMEAQLSRLIGQSLWDVSRSSTGNLVEWFLLRKAYERNELAPNKPDEKELARRRQSYEGGYVKEPERGLWENIVYLDFRSLYPSIIITHNVSPDTLNREGCKEYDVAPQVGHRFCKDFPGFIPSLLGDLLEERQKIKKKMKATIDPIERKLLDYRQRAIKILANSYYGYYGYARARWYCKECAESVTAWGREYITMTIKEIEEKYGFKVIYSDTDGFFATIPGADAETVKKKAMEFLKYINAKLPGALELEYEGFYKRGFFVTKKKYAVIDEEGKITTRGLEIVRRDWSEIAKETQARVLEALLKDGDVEKAVRIVKEVTEKLSKYEVPPEKLVIHEQITRDLKDYKATGPHVAVAKRLAARGVKIRPGTVISYIVLKGSGRIGDRAIPFDEFDPTKHKYDAEYYIENQVLPAVERILRAFGYRKEDLRYQKTRQVGLSAWLKPKGT

SEQ ID NO: 3094 - protein, 774 aa, synthetic construct
MILDTDMITEDGKPVIRIFKKENGEFKIEYDRTFEWYFYALLKDDSAIEEVKKITAERHGTVVTVKRVEKVQKKFLGRPVEVWKLYFTHYQDIPAIHDKIREHPAVIDIYEYDIPFAKRYLIDKGLVPMEGDEELKMLAFDIETLYHEGEEFAEGPILMISYADEEGARVITWKNVDLPYVDVVSTEREMIKRFLRVVKEKDPDVLITYNGDNFDFAYLKKRCEKLGINFALGRDGSEPKIQRMGDRFAVEVKGRIHFDLYPVIRRTINLPTYTLEAVYEAVFGQPKEKVYAEEITTAWETGENLERVARYSMEDAKVTYELGKEFLPMEAQLSRLIGQSLWDVSRSSTGNLVEWFLLRKAYERNELAPNKPDEKELARRRQSYEGGYVKEPERGLWENIVYLDFRSLYPSIIITHNVSPDTLNREGCKEYDVAPQVGHRFCKDFPGFIPSLLGDLLEERQKIKKKMKATIDPIERKLLDYRQRAIKILANSYYGYYGYARARWYCKECAESVTAWGREYITMTIKEIEEKYGFKVIYSDTDGFFATIPGADAETVKKKAMEFLKYINAKLPGALELEYEGFYKRGFFVTKKKYAVIDEEGKITTRGLEIVRRDWSEIAKETQARVLEALLKDGDVEKAVRIVKEVTEKLSKYEVPPEKLVIHEQITRDLKDYKATGPHVAVAKRLAARGVKIRPGTVISYIVLKGSGRIGDRAIPFDEFDPTKHKYDAEYYIENQVLPAVERILRAFGYRKEDLRYQKTRQVGLSAWLKPKGT

SEQ ID NO: 3095 - protein, 774 aa, synthetic construct
MILDTDMITEDGKPVIRIFKKENGEFKIEYDRTFEWYFYALLKDDSAIEEVKKITAERHGTVVTVKRVEKVQKKFLGRPVEVWKLYFTHYQDIPAIWDKIREHPAVIDIYEYDIPFAKRYLIDKGLVPMEGDEELKMLAFDIETLYHEGEEFAEGPILMISYADEEGARVITWKNVDLPYVDVVSTEREMIKRFLRVVKEKDPDVLITYNGDNFDFAYLKKRCEKLGINFALGRDGSEPKIQRMGDRFAVEVKGRIHFDLYPVIRRTINLPTYTLEAVYEAVFGQPKEKVYAEEITTAWETGENLERVARYSMEDAKVTYELGKEFLPMEAQLSRLIGQSLWDVSRSSTGNLVEWFLLRKAYERNELAPNKPDEKELARRRQSYEGGYVKEPERGLWENIVYLDFRSLYPSIIITHNVSPDTLNREGCKEYDVAPQVGHRFCKDFPGFIPSLLGDLLEERQKIKKKMKATIDPIERKLLDYRQRAIKILANSYYGYYGYARARWYCKECAESVTAWGREYITMTIKEIEEKYGFKVIYSDTDGFFATIPGADAETVKKKAMEFLKYINAKLPGALELEYEGFYKRGFFVTKKKYAVIDEEGKITTRGLEIVRRDWSEIAKETQARVLEALLKDGDVEKAVRIVKEVTEKLSKYEVPPEKLVIHEQITRDLKDYKATGPHVAVAKRLAARGVKIRPGTVISYIVLKGSGRIGDRAIPFDEFDPTKHKYDAEYYIENQVLPAVERILRAFGYRKEDLRYQKTRQVGLSAWLKPKGT

SEQ ID NO: 3096 - protein, 774 aa, synthetic construct
MILDTDMITEDGKPVIRIFKKENGEFKIEYDRTFEWYFYALLKDDSAIEEVKKITAERHGTVVTVKRVEKVQKKFLGRPVEVWKLYFTHYQDRPAIRDKIREHPAVIDIYEYDIPFAKRYLIDKGLVPMEGDEELKMLAFDIETLYHEGEEFAEGPILMISYADEEGARVITWKNVDLPYVDVVSTEREMIKRFLRVVKEKDPDVLITYNGDNFDFAYLKKRCEKLGINFALGRDGSEPKIQRMGDRFAVEVKGRIHFDLYPVIRRTINLPTYTLEAVYEAVFGQPKEKVYAEEITTAWETGENLERVARYSMEDAKVTYELGKEFLPMEAQLSRLIGQSLWDVSRSSTGNLVEWFLLRKAYERNELAPNKPDEKELARRRQSYEGGYVKEPERGLWENIVYLDFRSLYPSIIITHNVSPDTLNREGCKEYDVAPQVGHRFCKDFPGFIPSLLGDLLEERQKIKKKMKATIDPIERKLLDYRQRAIKILANSYYGYYGYARARWYCKECAESVTAWGREYITMTIKEIEEKYGFKVIYSDTDGFFATIPGADAETVKKKAMEFLKYINAKLPGALELEYEGFYKRGFFVTKKKYAVIDEEGKITTRGLEIVRRDWSEIAKETQARVLEALLKDGDVEKAVRIVKEVTEKLSKYEVPPEKLVIHEQITRDLKDYKATGPHVAVAKRLAARGVKIRPGTVISYIVLKGSGRIGDRAIPFDEFDPTKHKYDAEYYIENQVLPAVERILRAFGYRKEDLRYQKTRQVGLSAWLKPKGT

SEQ ID NO: 3097 - protein, 774 aa, synthetic construct
MILDTDMITEDGKPVIRIFKKENGEFKIEYDRTFEWYFYALLKDDSAIEEVKKITAERHGTVVTVKRVEKVQKKFLGRPVEVWKLYFTHPQDVPAIADKIREHPAVIDIYEYDIPFAKRYLIDKGLVPMEGDEELKMLAFDIETLYHEGEEFAEGPILMISYADEEGARVITWKNVDLPYVDVVSTEREMIKRFLRVVKEKDPDVLITYNGDNFDFAYLKKRCEKLGINFALGRDGSEPKIQRMGDRFAVEVKGRIHFDLYPVIRRTINLPTYTLEAVYEAVFGQPKEKVYAEEITTAWETGENLERVARYSMEDAKVTYELGKEFLPMEAQLSRLIGQSLWDVSRSSTGNLVEWFLLRKAYERNELAPNKPDEKELARRRQSYEGGYVKEPERGLWENIVYLDFRSLYPSIIITHNVSPDTLNREGCKEYDVAPQVGHRFCKDFPGFIPSLLGDLLEERQKIKKKMKATIDPIERKLLDYRQRAIKILANSYYGYYGYARARWYCKECAESVTAWGREYITMTIKEIEEKYGFKVIYSDTDGFFATIPGADAETVKKKAMEFLKYINAKLPGALELEYEGFYKRGFFVTKKKYAVIDEEGKITTRGLEIVRRDWSEIAKETQARVLEALLKDGDVEKAVRIVKEVTEKLSKYEVPPEKLVIHEQITRDLKDYKATGPHVAVAKRLAARGVKIRPGTVISYIVLKGSGRIGDRAIPFDEFDPTKHKYDAEYYIENQVLPAVERILRAFGYRKEDLRYQKTRQVGLSAWLKPKGT

SEQ ID NO: 3098 - protein, 774 aa, synthetic construct
MILDTDMITEDGKPVIRIFKKENGEFKIEYDRTFEWYFYALLKDDSAIEEVKKITAERHGTVVTVKRVEKVQKKFLGRPVEVWKLYFTHPQDVPAIFDKIREHPAVIDIYEYDIPFAKRYLIDKGLVPMEGDEELKMLAFDIETLYHEGEEFAEGPILMISYADEEGARVITWKNVDLPYVDVVSTEREMIKRFLRVVKEKDPDVLITYNGDNFDFAYLKKRCEKLGINFALGRDGSEPKIQRMGDRFAVEVKGRIHFDLYPVIRRTINLPTYTLEAVYEAVFGQPKEKVYAEEITTAWETGENLERVARYSMEDAKVTYELGKEFLPMEAQLSRLIGQSLWDVSRSSTGNLVEWFLLRKAYERNELAPNKPDEKELARRRQSYEGGYVKEPERGLWENIVYLDFRSLYPSIIITHNVSPDTLNREGCKEYDVAPQVGHRFCKDFPGFIPSLLGDLLEERQKIKKKMKATIDPIERKLLDYRQRAIKILANSYYGYYGYARARWYCKECAESVTAWGREYITMTIKEIEEKYGFKVIYSDTDGFFATIPGADAETVKKKAMEFLKYINAKLPGALELEYEGFYKRGFFVTKKKYAVIDEEGKITTRGLEIVRRDWSEIAKETQARVLEALLKDGDVEKAVRIVKEVTEKLSKYEVPPEKLVIHEQITRDLKDYKATGPHVAVAKRLAARGVKIRPGTVISYIVLKGSGRIGDRAIPFDEFDPTKHKYDAEYYIENQVLPAVERILRAFGYRKEDLRYQKTRQVGLSAWLKPKGT

SEQ ID NO: 3099 - protein, 774 aa, synthetic construct
MILDTDMITEDGKPVIRIFKKENGEFKIEYDRTFEWYFYALLKDDSAIEEVKKITAERHGTVVTVKRVEKVQKKFLGRPVEVWKLYFTHPQDVPAIHDKIREHPAVIDIYEYDIPFAKRYLIDKGLVPMEGDEELKMLAFDIETLYHEGEEFAEGPILMISYADEEGARVITWKNVDLPYVDVVSTEREMIKRFLRVVKEKDPDVLITYNGDNFDFAYLKKRCEKLGINFALGRDGSEPKIQRMGDRFAVEVKGRIHFDLYPVIRRTINLPTYTLEAVYEAVFGQPKEKVYAEEITTAWETGENLERVARYSMEDAKVTYELGKEFLPMEAQLSRLIGQSLWDVSRSSTGNLVEWFLLRKAYERNELAPNKPDEKELARRRQSYEGGYVKEPERGLWENIVYLDFRSLYPSIIITHNVSPDTLNREGCKEYDVAPQVGHRFCKDFPGFIPSLLGDLLEERQKIKKKMKATIDPIERKLLDYRQRAIKILANSYYGYYGYARARWYCKECAESVTAWGREYITMTIKEIEEKYGFKVIYSDTDGFFATIPGADAETVKKKAMEFLKYINAKLPGALELEYEGFYKRGFFVTKKKYAVIDEEGKITTRGLEIVRRDWSEIAKETQARVLEALLKDGDVEKAVRIVKEVTEKLSKYEVPPEKLVIHEQITRDLKDYKATGPHVAVAKRLAARGVKIRPGTVISYIVLKGSGRIGDRAIPFDEFDPTKHKYDAEYYIENQVLPAVERILRAFGYRKEDLRYQKTRQVGLSAWLKPKGT

SEQ ID NO: 3100 - protein, 774 aa, synthetic construct
MILDTDMITEDGKPVIRIFKKENGEFKIEYDRTFEWYFYALLKDDSAIEEVKKITAERHGTVVTVKRVEKVQKKFLGRPVEVWKLYFTHPQDIPAIRDKIREHPAVIDIYEYDIPFAKRYLIDKGLVPMEGDEELKMLAFDIETLYHEGEEFAEGPILMISYADEEGARVITWKNVDLPYVDVVSTEREMIKRFLRVVKEKDPDVLITYNGDNFDFAYLKKRCEKLGINFALGRDGSEPKIQRMGDRFAVEVKGRIHFDLYPVIRRTINLPTYTLEAVYEAVFGQPKEKVYAEEITTAWETGENLERVARYSMEDAKVTYELGKEFLPMEAQLSRLIGQSLWDVSRSSTGNLVEWFLLRKAYERNELAPNKPDEKELARRRQSYEGGYVKEPERGLWENIVYLDFRSLYPSIIITHNVSPDTLNREGCKEYDVAPQVGHRFCKDFPGFIPSLLGDLLEERQKIKKKMKATIDPIERKLLDYRQRAIKILANSYYGYYGYARARWYCKECAESVTAWGREYITMTIKEIEEKYGFKVIYSDTDGFFATIPGADAETVKKKAMEFLKYINAKLPGALELEYEGFYKRGFFVTKKKYAVIDEEGKITTRGLEIVRRDWSEIAKETQARVLEALLKDGDVEKAVRIVKEVTEKLSKYEVPPEKLVIHEQITRDLKDYKATGPHVAVAKRLAARGVKIRPGTVISYIVLKGSGRIGDRAIPFDEFDPTKHKYDAEYYIENQVLPAVERILRAFGYRKEDLRYQKTRQVGLSAWLKPKGT

SEQ ID NO: 3101 - protein, 774 aa, synthetic construct
MILDTDMITEDGKPVIRIFKKENGEFKIEYDRTFEWYFYALLKDDSAIEEVKKITAERHGTVVTVKRVEKVQKKFLGRPVEVWKLYFTHPQDIPAIADKIREHPAVIDIYEYDIPFAKRYLIDKGLVPMEGDEELKMLAFDIETLYHEGEEFAEGPILMISYADEEGARVITWKNVDLPYVDVVSTEREMIKRFLRVVKEKDPDVLITYNGDNFDFAYLKKRCEKLGINFALGRDGSEPKIQRMGDRFAVEVKGRIHFDLYPVIRRTINLPTYTLEAVYEAVFGQPKEKVYAEEITTAWETGENLERVARYSMEDAKVTYELGKEFLPMEAQLSRLIGQSLWDVSRSSTGNLVEWFLLRKAYERNELAPNKPDEKELARRRQSYEGGYVKEPERGLWENIVYLDFRSLYPSIIITHNVSPDTLNREGCKEYDVAPQVGHRFCKDFPGFIPSLLGDLLEERQKIKKKMKATIDPIERKLLDYRQRAIKILANSYYGYYGYARARWYCKECAESVTAWGREYITMTIKEIEEKYGFKVIYSDTDGFFATIPGADAETVKKKAMEFLKYINAKLPGALELEYEGFYKRGFFVTKKKYAVIDEEGKITTRGLEIVRRDWSEIAKETQARVLEALLKDGDVEKAVRIVKEVTEKLSKYEVPPEKLVIHEQITRDLKDYKATGPHVAVAKRLAARGVKIRPGTVISYIVLKGSGRIGDRAIPFDEFDPTKHKYDAEYYIENQVLPAVERILRAFGYRKEDLRYQKTRQVGLSAWLKPKGT

SEQ ID NO: 3102 - protein, 774 aa, synthetic construct
MILDTDMITEDGKPVIRIFKKENGEFKIEYDRTFEWYFYALLKDDSAIEEVKKITAERHGTVVTVKRVEKVQKKFLGRPVEVWKLYFTHPQDIPAIFDKIREHPAVIDIYEYDIPFAKRYLIDKGLVPMEGDEELKMLAFDIETLYHEGEEFAEGPILMISYADEEGARVITWKNVDLPYVDVVSTEREMIKRFLRVVKEKDPDVLITYNGDNFDFAYLKKRCEKLGINFALGRDGSEPKIQRMGDRFAVEVKGRIHFDLYPVIRRTINLPTYTLEAVYEAVFGQPKEKVYAEEITTAWETGENLERVARYSMEDAKVTYELGKEFLPMEAQLSRLIGQSLWDVSRSSTGNLVEWFLLRKAYERNELAPNKPDEKELARRRQSYEGGYVKEPERGLWENIVYLDFRSLYPSIIITHNVSPDTLNREGCKEYDVAPQVGHRFCKDFPGFIPSLLGDLLEERQKIKKKMKATIDPIERKLLDYRQRAIKILANSYYGYYGYARARWYCKECAESVTAWGREYITMTIKEIEEKYGFKVIYSDTDGFFATIPGADAETVKKKAMEFLKYINAKLPGALELEYEGFYKRGFFVTKKKYAVIDEEGKITTRGLEIVRRDWSEIAKETQARVLEALLKDGDVEKAVRIVKEVTEKLSKYEVPPEKLVIHEQITRDLKDYKATGPHVAVAKRLAARGVKIRPGTVISYIVLKGSGRIGDRAIPFDEFDPTKHKYDAEYYIENQVLPAVERILRAFGYRKEDLRYQKTRQVGLSAWLKPKGT

SEQ ID NO: 3103 - protein, 774 aa, synthetic construct
MILDTDMITEDGKPVIRIFKKENGEFKIEYDRTFEWYFYALLKDDSAIEEVKKITAERHGTVVTVKRVEKVQKKFLGRPVEVWKLYFTHPQDIPAIHDKIREHPAVIDIYEYDIPFAKRYLIDKGLVPMEGDEELKMLAFDIETLYHEGEEFAEGPILMISYADEEGARVITWKNVDLPYVDVVSTEREMIKRFLRVVKEKDPDVLITYNGDNFDFAYLKKRCEKLGINFALGRDGSEPKIQRMGDRFAVEVKGRIHFDLYPVIRRTINLPTYTLEAVYEAVFGQPKEKVYAEEITTAWETGENLERVARYSMEDAKVTYELGKEFLPMEAQLSRLIGQSLWDVSRSSTGNLVEWFLLRKAYERNELAPNKPDEKELARRRQSYEGGYVKEPERGLWENIVYLDFRSLYPSIIITHNVSPDTLNREGCKEYDVAPQVGHRFCKDFPGFIPSLLGDLLEERQKIKKKMKATIDPIERKLLDYRQRAIKILANSYYGYYGYARARWYCKECAESVTAWGREYITMTIKEIEEKYGFKVIYSDTDGFFATIPGADAETVKKKAMEFLKYINAKLPGALELEYEGFYKRGFFVTKKKYAVIDEEGKITTRGLEIVRRDWSEIAKETQARVLEALLKDGDVEKAVRIVKEVTEKLSKYEVPPEKLVIHEQITRDLKDYKATGPHVAVAKRLAARGVKIRPGTVISYIVLKGSGRIGDRAIPFDEFDPTKHKYDAEYYIENQVLPAVERILRAFGYRKEDLRYQKTRQVGLSAWLKPKGT

SEQ ID NO: 3104 - protein, 774 aa, synthetic construct
MILDTDMITEDGKPVIRIFKKENGEFKIEYDRTFEWYFYALLKDDSAIEEVKKITAERHGTVVTVKRVEKVQKKFLGRPVEVWKLYFTHPQDIPAIWDKIREHPAVIDIYEYDIPFAKRYLIDKGLVPMEGDEELKMLAFDIETLYHEGEEFAEGPILMISYADEEGARVITWKNVDLPYVDVVSTEREMIKRFLRVVKEKDPDVLITYNGDNFDFAYLKKRCEKLGINFALGRDGSEPKIQRMGDRFAVEVKGRIHFDLYPVIRRTINLPTYTLEAVYEAVFGQPKEKVYAEEITTAWETGENLERVARYSMEDAKVTYELGKEFLPMEAQLSRLIGQSLWDVSRSSTGNLVEWFLLRKAYERNELAPNKPDEKELARRRQSYEGGYVKEPERGLWENIVYLDFRSLYPSIIITHNVSPDTLNREGCKEYDVAPQVGHRFCKDFPGFIPSLLGDLLEERQKIKKKMKATIDPIERKLLDYRQRAIKILANSYYGYYGYARARWYCKECAESVTAWGREYITMTIKEIEEKYGFKVIYSDTDGFFATIPGADAETVKKKAMEFLKYINAKLPGALELEYEGFYKRGFFVTKKKYAVIDEEGKITTRGLEIVRRDWSEIAKETQARVLEALLKDGDVEKAVRIVKEVTEKLSKYEVPPEKLVIHEQITRDLKDYKATGPHVAVAKRLAARGVKIRPGTVISYIVLKGSGRIGDRAIPFDEFDPTKHKYDAEYYIENQVLPAVERILRAFGYRKEDLRYQKTRQVGLSAWLKPKGT

SEQ ID NO: 3105 - protein, 774 aa, synthetic construct
MILDTDMITEDGKPVIRIFKKENGEFKIEYDRTFEWYFYALLKDDSAIEEVKKITAERHGTVVTVKRVEKVQKKFLGRPVEVWKLYFTHPQDKPAIRDKIREHPAVIDIYEYDIPFAKRYLIDKGLVPMEGDEELKMLAFDIETLYHEGEEFAEGPILMISYADEEGARVITWKNVDLPYVDVVSTEREMIKRFLRVVKEKDPDVLITYNGDNFDFAYLKKRCEKLGINFALGRDGSEPKIQRMGDRFAVEVKGRIHFDLYPVIRRTINLPTYTLEAVYEAVFGQPKEKVYAEEITTAWETGENLERVARYSMEDAKVTYELGKEFLPMEAQLSRLIGQSLWDVSRSSTGNLVEWFLLRKAYERNELAPNKPDEKELARRRQSYEGGYVKEPERGLWENIVYLDFRSLYPSIIITHNVSPDTLNREGCKEYDVAPQVGHRFCKDFPGFIPSLLGDLLEERQKIKKKMKATIDPIERKLLDYRQRAIKILANSYYGYYGYARARWYCKECAESVTAWGREYITMTIKEIEEKYGFKVIYSDTDGFFATIPGADAETVKKKAMEFLKYINAKLPGALELEYEGFYKRGFFVTKKKYAVIDEEGKITTRGLEIVRRDWSEIAKETQARVLEALLKDGDVEKAVRIVKEVTEKLSKYEVPPEKLVIHEQITRDLKDYKATGPHVAVAKRLAARGVKIRPGTVISYIVLKGSGRIGDRAIPFDEFDPTKHKYDAEYYIENQVLPAVERILRAFGYRKEDLRYQKTRQVGLSAWLKPKGT

SEQ ID NO: 3106 - protein, 774 aa, synthetic construct
MILDTDMITEDGKPVIRIFKKENGEFKIEYDRTFEWYFYALLKDDSAIEEVKKITAERHGTVVTVKRVEKVQKKFLGRPVEVWKLYFTHPQDQPAIRDKIREHPAVIDIYEYDIPFAKRYLIDKGLVPMEGDEELKMLAFDIETLYHEGEEFAEGPILMISYADEEGARVITWKNVDLPYVDVVSTEREMIKRFLRVVKEKDPDVLITYNGDNFDFAYLKKRCEKLGINFALGRDGSEPKIQRMGDRFAVEVKGRIHFDLYPVIRRTINLPTYTLEAVYEAVFGQPKEKVYAEEITTAWETGENLERVARYSMEDAKVTYELGKEFLPMEAQLSRLIGQSLWDVSRSSTGNLVEWFLLRKAYERNELAPNKPDEKELARRRQSYEGGYVKEPERGLWENIVYLDFRSLYPSIIITHNVSPDTLNREGCKEYDVAPQVGHRFCKDFPGFIPSLLGDLLEERQKIKKKMKATIDPIERKLLDYRQRAIKILANSYYGYYGYARARWYCKECAESVTAWGREYITMTIKEIEEKYGFKVIYSDTDGFFATIPGADAETVKKKAMEFLKYINAKLPGALELEYEGFYKRGFFVTKKKYAVIDEEGKITTRGLEIVRRDWSEIAKETQARVLEALLKDGDVEKAVRIVKEVTEKLSKYEVPPEKLVIHEQITRDLKDYKATGPHVAVAKRLAARGVKIRPGTVISYIVLKGSGRIGDRAIPFDEFDPTKHKYDAEYYIENQVLPAVERILRAFGYRKEDLRYQKTRQVGLSAWLKPKGT

SEQ ID NO: 3107 - protein, 774 aa, synthetic construct
MILDTDMITEDGKPVIRIFKKENGEFKIEYDRTFEWYFYALLKDDSAIEEVKKITAERHGTVVTVKRVEKVQKKFLGRPVEVWKLYFTHPQDRPAIRDKIREHPAVIDIYEYDIPFAKRYLIDKGLVPMEGDEELKMLAFDIETLYHEGEEFAEGPILMISYADEEGARVITWKNVDLPYVDVVSTEREMIKRFLRVVKEKDPDVLITYNGDNFDFAYLKKRCEKLGINFALGRDGSEPKIQRMGDRFAVEVKGRIHFDLYPVIRRTINLPTYTLEAVYEAVFGQPKEKVYAEEITTAWETGENLERVARYSMEDAKVTYELGKEFLPMEAQLSRLIGQSLWDVSRSSTGNLVEWFLLRKAYERNELAPNKPDEKELARRRQSYEGGYVKEPERGLWENIVYLDFRSLYPSIIITHNVSPDTLNREGCKEYDVAPQVGHRFCKDFPGFIPSLLGDLLEERQKIKKKMKATIDPIERKLLDYRQRAIKILANSYYGYYGYARARWYCKECAESVTAWGREYITMTIKEIEEKYGFKVIYSDTDGFFATIPGADAETVKKKAMEFLKYINAKLPGALELEYEGFYKRGFFVTKKKYAVIDEEGKITTRGLEIVRRDWSEIAKETQARVLEALLKDGDVEKAVRIVKEVTEKLSKYEVPPEKLVIHEQITRDLKDYKATGPHVAVAKRLAARGVKIRPGTVISYIVLKGSGRIGDRAIPFDEFDPTKHKYDAEYYIENQVLPAVERILRAFGYRKEDLRYQKTRQVGLSAWLKPKGT

SEQ ID NO: 3108 - protein, 774 aa, synthetic construct
MILDTDMITEDGKPVIRIFKKENGEFKIEYDRTFEWYFYALLKDDSAIEEVKKITAERHGTVVTVKRVEKVQKKFLGRPVEVWKLYFTHPQDRPAIADKIREHPAVIDIYEYDIPFAKRYLIDKGLVPMEGDEELKMLAFDIETLYHEGEEFAEGPILMISYADEEGARVITWKNVDLPYVDVVSTEREMIKRFLRVVKEKDPDVLITYNGDNFDFAYLKKRCEKLGINFALGRDGSEPKIQRMGDRFAVEVKGRIHFDLYPVIRRTINLPTYTLEAVYEAVFGQPKEKVYAEEITTAWETGENLERVARYSMEDAKVTYELGKEFLPMEAQLSRLIGQSLWDVSRSSTGNLVEWFLLRKAYERNELAPNKPDEKELARRRQSYEGGYVKEPERGLWENIVYLDFRSLYPSIIITHNVSPDTLNREGCKEYDVAPQVGHRFCKDFPGFIPSLLGDLLEERQKIKKKMKATIDPIERKLLDYRQRAIKILANSYYGYYGYARARWYCKECAESVTAWGREYITMTIKEIEEKYGFKVIYSDTDGFFATIPGADAETVKKKAMEFLKYINAKLPGALELEYEGFYKRGFFVTKKKYAVIDEEGKITTRGLEIVRRDWSEIAKETQARVLEALLKDGDVEKAVRIVKEVTEKLSKYEVPPEKLVIHEQITRDLKDYKATGPHVAVAKRLAARGVKIRPGTVISYIVLKGSGRIGDRAIPFDEFDPTKHKYDAEYYIENQVLPAVERILRAFGYRKEDLRYQKTRQVGLSAWLKPKGT

SEQ ID NO: 3109 - protein, 774 aa, synthetic construct
MILDTDMITEDGKPVIRIFKKENGEFKIEYDRTFEWYFYALLKDDSAIEEVKKITAERHGTVVTVKRVEKVQKKFLGRPVEVWKLYFTHPQDRPAIFDKIREHPAVIDIYEYDIPFAKRYLIDKGLVPMEGDEELKMLAFDIETLYHEGEEFAEGPILMISYADEEGARVITWKNVDLPYVDVVSTEREMIKRFLRVVKEKDPDVLITYNGDNFDFAYLKKRCEKLGINFALGRDGSEPKIQRMGDRFAVEVKGRIHFDLYPVIRRTINLPTYTLEAVYEAVFGQPKEKVYAEEITTAWETGENLERVARYSMEDAKVTYELGKEFLPMEAQLSRLIGQSLWDVSRSSTGNLVEWFLLRKAYERNELAPNKPDEKELARRRQSYEGGYVKEPERGLWENIVYLDFRSLYPSIIITHNVSPDTLNREGCKEYDVAPQVGHRFCKDFPGFIPSLLGDLLEERQKIKKKMKATIDPIERKLLDYRQRAIKILANSYYGYYGYARARWYCKECAESVTAWGREYITMTIKEIEEKYGFKVIYSDTDGFFATIPGADAETVKKKAMEFLKYINAKLPGALELEYEGFYKRGFFVTKKKYAVIDEEGKITTRGLEIVRRDWSEIAKETQARVLEALLKDGDVEKAVRIVKEVTEKLSKYEVPPEKLVIHEQITRDLKDYKATGPHVAVAKRLAARGVKIRPGTVISYIVLKGSGRIGDRAIPFDEFDPTKHKYDAEYYIENQVLPAVERILRAFGYRKEDLRYQKTRQVGLSAWLKPKGT

SEQ ID NO: 3110 - protein, 774 aa, synthetic construct
MILDTDMITEDGKPVIRIFKKENGEFKIEYDRTFEPYFYALLKDDSAIEEVKKITAERHGTVVTVKRVEKVQKKFLGRPVEVWKLYFTHFQDVPAIRDKIREHPAVIDIYEYDIPFAKRYLIDKGLVPMEGDEELKMLAFDIETLYHEGEEFAEGPILMISYADEEGARVITWKNVDLPYVDVVSTEREMIKRFLRVVKEKDPDVLITYNGDNFDFAYLKKRCEKLGINFALGRDGSEPKIQRMGDRFAVEVKGRIHFDLYPVIRRTINLPTYTLEAVYEAVFGQPKEKVYAEEITTAWETGENLERVARYSMEDAKVTYELGKEFLPMEAQLSRLIGQSLWDVSRSSTGNLVEWFLLRKAYERNELAPNKPDEKELARRRQSYEGGYVKEPERGLWENIVYLDFRSLYPSIIITHNVSPDTLNREGCKEYDVAPQVGHRFCKDFPGFIPSLLGDLLEERQKIKKKMKATIDPIERKLLDYRQRAIKILANSYYGYYGYARARWYCKECAESVTAWGREYITMTIKEIEEKYGFKVIYSDTDGFFATIPGADAETVKKKAMEFLKYINAKLPGALELEYEGFYKRGFFVTKKKYAVIDEEGKITTRGLEIVRRDWSEIAKETQARVLEALLKDGDVEKAVRIVKEVTEKLSKYEVPPEKLVIHEQITRDLKDYKATGPHVAVAKRLAARGVKIRPGTVISYIVLKGSGRIGDRAIPFDEFDPTKHKYDAEYYIENQVLPAVERILRAFGYRKEDLRYQKTRQVGLSAWLKPKGT

SEQ ID NO: 3111 - protein, 774 aa, synthetic construct
MILDTDMITEDGKPVIRIFKKENGEFKIEYDRTFEPYFYALLKDDSAIEEVKKITAERHGTVVTVKRVEKVQKKFLGRPVEVWKLYFTHFQDVPAIADKIREHPAVIDIYEYDIPFAKRYLIDKGLVPMEGDEELKMLAFDIETLYHEGEEFAEGPILMISYADEEGARVITWKNVDLPYVDVVSTEREMIKRFLRVVKEKDPDVLITYNGDNFDFAYLKKRCEKLGINFALGRDGSEPKIQRMGDRFAVEVKGRIHFDLYPVIRRTINLPTYTLEAVYEAVFGQPKEKVYAEEITTAWETGENLERVARYSMEDAKVTYELGKEFLPMEAQLSRLIGQSLWDVSRSSTGNLVEWFLLRKAYERNELAPNKPDEKELARRRQSYEGGYVKEPERGLWENIVYLDFRSLYPSIIITHNVSPDTLNREGCKEYDVAPQVGHRFCKDFPGFIPSLLGDLLEERQKIKKKMKATIDPIERKLLDYRQRAIKILANSYYGYYGYARARWYCKECAESVTAWGREYITMTIKEIEEKYGFKVIYSDTDGFFATIPGADAETVKKKAMEFLKYINAKLPGALELEYEGFYKRGFFVTKKKYAVIDEEGKITTRGLEIVRRDWSEIAKETQARVLEALLKDGDVEKAVRIVKEVTEKLSKYEVPPEKLVIHEQITRDLKDYKATGPHVAVAKRLAARGVKIRPGTVISYIVLKGSGRIGDRAIPFDEFDPTKHKYDAEYYIENQVLPAVERILRAFGYRKEDLRYQKTRQVGLSAWLKPKGT

SEQ ID NO: 3112 - protein, 774 aa, synthetic construct
MILDTDMITEDGKPVIRIFKKENGEFKIEYDRTFEPYFYALLKDDSAIEEVKKITAERHGTVVTVKRVEKVQKKFLGRPVEVWKLYFTHFQDVPAIFDKIREHPAVIDIYEYDIPFAKRYLIDKGLVPMEGDEELKMLAFDIETLYHEGEEFAEGPILMISYADEEGARVITWKNVDLPYVDVVSTEREMIKRFLRVVKEKDPDVLITYNGDNFDFAYLKKRCEKLGINFALGRDGSEPKIQRMGDRFAVEVKGRIHFDLYPVIRRTINLPTYTLEAVYEAVFGQPKEKVYAEEITTAWETGENLERVARYSMEDAKVTYELGKEFLPMEAQLSRLIGQSLWDVSRSSTGNLVEWFLLRKAYERNELAPNKPDEKELARRRQSYEGGYVKEPERGLWENIVYLDFRSLYPSIIITHNVSPDTLNREGCKEYDVAPQVGHRFCKDFPGFIPSLLGDLLEERQKIKKKMKATIDPIERKLLDYRQRAIKILANSYYGYYGYARARWYCKECAESVTAWGREYITMTIKEIEEKYGFKVIYSDTDGFFATIPGADAETVKKKAMEFLKYINAKLPGALELEYEGFYKRGFFVTKKKYAVIDEEGKITTRGLEIVRRDWSEIAKETQARVLEALLKDGDVEKAVRIVKEVTEKLSKYEVPPEKLVIHEQITRDLKDYKATGPHVAVAKRLAARGVKIRPGTVISYIVLKGSGRIGDRAIPFDEFDPTKHKYDAEYYIENQVLPAVERILRAFGYRKEDLRYQKTRQVGLSAWLKPKGT

SEQ ID NO: 3113 - protein, 774 aa, synthetic construct
MILDTDMITEDGKPVIRIFKKENGEFKIEYDRTFEPYFYALLKDDSAIEEVKKITAERHGTVVTVKRVEKVQKKFLGRPVEVWKLYFTHFQDVPAIHDKIREHPAVIDIYEYDIPFAKRYLIDKGLVPMEGDEELKMLAFDIETLYHEGEEFAEGPILMISYADEEGARVITWKNVDLPYVDVVSTEREMIKRFLRVVKEKDPDVLITYNGDNFDFAYLKKRCEKLGINFALGRDGSEPKIQRMGDRFAVEVKGRIHFDLYPVIRRTINLPTYTLEAVYEAVFGQPKEKVYAEEITTAWETGENLERVARYSMEDAKVTYELGKEFLPMEAQLSRLIGQSLWDVSRSSTGNLVEWFLLRKAYERNELAPNKPDEKELARRRQSYEGGYVKEPERGLWENIVYLDFRSLYPSIIITHNVSPDTLNREGCKEYDVAPQVGHRFCKDFPGFIPSLLGDLLEERQKIKKKMKATIDPIERKLLDYRQRAIKILANSYYGYYGYARARWYCKECAESVTAWGREYITMTIKEIEEKYGFKVIYSDTDGFFATIPGADAETVKKKAMEFLKYINAKLPGALELEYEGFYKRGFFVTKKKYAVIDEEGKITTRGLEIVRRDWSEIAKETQARVLEALLKDGDVEKAVRIVKEVTEKLSKYEVPPEKLVIHEQITRDLKDYKATGPHVAVAKRLAARGVKIRPGTVISYIVLKGSGRIGDRAIPFDEFDPTKHKYDAEYYIENQVLPAVERILRAFGYRKEDLRYQKTRQVGLSAWLKPKGT

SEQ ID NO: 3114 - protein, 774 aa, synthetic construct
MILDTDMITEDGKPVIRIFKKENGEFKIEYDRTFEPYFYALLKDDSAIEEVKKITAERHGTVVTVKRVEKVQKKFLGRPVEVWKLYFTHFQDIPAIRDKIREHPAVIDIYEYDIPFAKRYLIDKGLVPMEGDEELKMLAFDIETLYHEGEEFAEGPILMISYADEEGARVITWKNVDLPYVDVVSTEREMIKRFLRVVKEKDPDVLITYNGDNFDFAYLKKRCEKLGINFALGRDGSEPKIQRMGDRFAVEVKGRIHFDLYPVIRRTINLPTYTLEAVYEAVFGQPKEKVYAEEITTAWETGENLERVARYSMEDAKVTYELGKEFLPMEAQLSRLIGQSLWDVSRSSTGNLVEWFLLRKAYERNELAPNKPDEKELARRRQSYEGGYVKEPERGLWENIVYLDFRSLYPSIIITHNVSPDTLNREGCKEYDVAPQVGHRFCKDFPGFIPSLLGDLLEERQKIKKKMKATIDPIERKLLDYRQRAIKILANSYYGYYGYARARWYCKECAESVTAWGREYITMTIKEIEEKYGFKVIYSDTDGFFATIPGADAETVKKKAMEFLKYINAKLPGALELEYEGFYKRGFFVTKKKYAVIDEEGKITTRGLEIVRRDWSEIAKETQARVLEALLKDGDVEKAVRIVKEVTEKLSKYEVPPEKLVIHEQITRDLKDYKATGPHVAVAKRLAARGVKIRPGTVISYIVLKGSGRIGDRAIPFDEFDPTKHKYDAEYYIENQVLPAVERILRAFGYRKEDLRYQKTRQVGLSAWLKPKGT

SEQ ID NO: 3115 - protein, 774 aa, synthetic construct
MILDTDMITEDGKPVIRIFKKENGEFKIEYDRTFEPYFYALLKDDSAIEEVKKITAERHGTVVTVKRVEKVQKKFLGRPVEVWKLYFTHFQDIPAIHDKIREHPAVIDIYEYDIPFAKRYLIDKGLVPMEGDEELKMLAFDIETLYHEGEEFAEGPILMISYADEEGARVITWKNVDLPYVDVVSTEREMIKRFLRVVKEKDPDVLITYNGDNFDFAYLKKRCEKLGINFALGRDGSEPKIQRMGDRFAVEVKGRIHFDLYPVIRRTINLPTYTLEAVYEAVFGQPKEKVYAEEITTAWETGENLERVARYSMEDAKVTYELGKEFLPMEAQLSRLIGQSLWDVSRSSTGNLVEWFLLRKAYERNELAPNKPDEKELARRRQSYEGGYVKEPERGLWENIVYLDFRSLYPSIIITHNVSPDTLNREGCKEYDVAPQVGHRFCKDFPGFIPSLLGDLLEERQKIKKKMKATIDPIERKLLDYRQRAIKILANSYYGYYGYARARWYCKECAESVTAWGREYITMTIKEIEEKYGFKVIYSDTDGFFATIPGADAETVKKKAMEFLKYINAKLPGALELEYEGFYKRGFFVTKKKYAVIDEEGKITTRGLEIVRRDWSEIAKETQARVLEALLKDGDVEKAVRIVKEVTEKLSKYEVPPEKLVIHEQITRDLKDYKATGPHVAVAKRLAARGVKIRPGTVISYIVLKGSGRIGDRAIPFDEFDPTKHKYDAEYYIENQVLPAVERILRAFGYRKEDLRYQKTRQVGLSAWLKPKGT

SEQ ID NO: 3116 - protein, 774 aa, synthetic construct
MILDTDMITEDGKPVIRIFKKENGEFKIEYDRTFEPYFYALLKDDSAIEEVKKITAERHGTVVTVKRVEKVQKKFLGRPVEVWKLYFTHFQDIPAIWDKIREHPAVIDIYEYDIPFAKRYLIDKGLVPMEGDEELKMLAFDIETLYHEGEEFAEGPILMISYADEEGARVITWKNVDLPYVDVVSTEREMIKRFLRVVKEKDPDVLITYNGDNFDFAYLKKRCEKLGINFALGRDGSEPKIQRMGDRFAVEVKGRIHFDLYPVIRRTINLPTYTLEAVYEAVFGQPKEKVYAEEITTAWETGENLERVARYSMEDAKVTYELGKEFLPMEAQLSRLIGQSLWDVSRSSTGNLVEWFLLRKAYERNELAPNKPDEKELARRRQSYEGGYVKEPERGLWENIVYLDFRSLYPSIIITHNVSPDTLNREGCKEYDVAPQVGHRFCKDFPGFIPSLLGDLLEERQKIKKKMKATIDPIERKLLDYRQRAIKILANSYYGYYGYARARWYCKECAESVTAWGREYITMTIKEIEEKYGFKVIYSDTDGFFATIPGADAETVKKKAMEFLKYINAKLPGALELEYEGFYKRGFFVTKKKYAVIDEEGKITTRGLEIVRRDWSEIAKETQARVLEALLKDGDVEKAVRIVKEVTEKLSKYEVPPEKLVIHEQITRDLKDYKATGPHVAVAKRLAARGVKIRPGTVISYIVLKGSGRIGDRAIPFDEFDPTKHKYDAEYYIENQVLPAVERILRAFGYRKEDLRYQKTRQVGLSAWLKPKGT

SEQ ID NO: 3117 - protein, 774 aa, synthetic construct
MILDTDMITEDGKPVIRIFKKENGEFKIEYDRTFEPYFYALLKDDSAIEEVKKITAERHGTVVTVKRVEKVQKKFLGRPVEVWKLYFTHFQDQPAIRDKIREHPAVIDIYEYDIPFAKRYLIDKGLVPMEGDEELKMLAFDIETLYHEGEEFAEGPILMISYADEEGARVITWKNVDLPYVDVVSTEREMIKRFLRVVKEKDPDVLITYNGDNFDFAYLKKRCEKLGINFALGRDGSEPKIQRMGDRFAVEVKGRIHFDLYPVIRRTINLPTYTLEAVYEAVFGQPKEKVYAEEITTAWETGENLERVARYSMEDAKVTYELGKEFLPMEAQLSRLIGQSLWDVSRSSTGNLVEWFLLRKAYERNELAPNKPDEKELARRRQSYEGGYVKEPERGLWENIVYLDFRSLYPSIIITHNVSPDTLNREGCKEYDVAPQVGHRFCKDFPGFIPSLLGDLLEERQKIKKKMKATIDPIERKLLDYRQRAIKILANSYYGYYGYARARWYCKECAESVTAWGREYITMTIKEIEEKYGFKVIYSDTDGFFATIPGADAETVKKKAMEFLKYINAKLPGALELEYEGFYKRGFFVTKKKYAVIDEEGKITTRGLEIVRRDWSEIAKETQARVLEALLKDGDVEKAVRIVKEVTEKLSKYEVPPEKLVIHEQITRDLKDYKATGPHVAVAKRLAARGVKIRPGTVISYIVLKGSGRIGDRAIPFDEFDPTKHKYDAEYYIENQVLPAVERILRAFGYRKEDLRYQKTRQVGLSAWLKPKGT

SEQ ID NO: 3118 - protein, 774 aa, synthetic construct
MILDTDMITEDGKPVIRIFKKENGEFKIEYDRTFEPYFYALLKDDSAIEEVKKITAERHGTVVTVKRVEKVQKKFLGRPVEVWKLYFTHFQDRPAIRDKIREHPAVIDIYEYDIPFAKRYLIDKGLVPMEGDEELKMLAFDIETLYHEGEEFAEGPILMISYADEEGARVITWKNVDLPYVDVVSTEREMIKRFLRVVKEKDPDVLITYNGDNFDFAYLKKRCEKLGINFALGRDGSEPKIQRMGDRFAVEVKGRIHFDLYPVIRRTINLPTYTLEAVYEAVFGQPKEKVYAEEITTAWETGENLERVARYSMEDAKVTYELGKEFLPMEAQLSRLIGQSLWDVSRSSTGNLVEWFLLRKAYERNELAPNKPDEKELARRRQSYEGGYVKEPERGLWENIVYLDFRSLYPSIIITHNVSPDTLNREGCKEYDVAPQVGHRFCKDFPGFIPSLLGDLLEERQKIKKKMKATIDPIERKLLDYRQRAIKILANSYYGYYGYARARWYCKECAESVTAWGREYITMTIKEIEEKYGFKVIYSDTDGFFATIPGADAETVKKKAMEFLKYINAKLPGALELEYEGFYKRGFFVTKKKYAVIDEEGKITTRGLEIVRRDWSEIAKETQARVLEALLKDGDVEKAVRIVKEVTEKLSKYEVPPEKLVIHEQITRDLKDYKATGPHVAVAKRLAARGVKIRPGTVISYIVLKGSGRIGDRAIPFDEFDPTKHKYDAEYYIENQVLPAVERILRAFGYRKEDLRYQKTRQVGLSAWLKPKGT

SEQ ID NO: 3119 - protein, 774 aa, synthetic construct
MILDTDMITEDGKPVIRIFKKENGEFKIEYDRTFEPYFYALLKDDSAIEEVKKITAERHGTVVTVKRVEKVQKKFLGRPVEVWKLYFTHFQDRPAIADKIREHPAVIDIYEYDIPFAKRYLIDKGLVPMEGDEELKMLAFDIETLYHEGEEFAEGPILMISYADEEGARVITWKNVDLPYVDVVSTEREMIKRFLRVVKEKDPDVLITYNGDNFDFAYLKKRCEKLGINFALGRDGSEPKIQRMGDRFAVEVKGRIHFDLYPVIRRTINLPTYTLEAVYEAVFGQPKEKVYAEEITTAWETGENLERVARYSMEDAKVTYELGKEFLPMEAQLSRLIGQSLWDVSRSSTGNLVEWFLLRKAYERNELAPNKPDEKELARRRQSYEGGYVKEPERGLWENIVYLDFRSLYPSIIITHNVSPDTLNREGCKEYDVAPQVGHRFCKDFPGFIPSLLGDLLEERQKIKKKMKATIDPIERKLLDYRQRAIKILANSYYGYYGYARARWYCKECAESVTAWGREYITMTIKEIEEKYGFKVIYSDTDGFFATIPGADAETVKKKAMEFLKYINAKLPGALELEYEGFYKRGFFVTKKKYAVIDEEGKITTRGLEIVRRDWSEIAKETQARVLEALLKDGDVEKAVRIVKEVTEKLSKYEVPPEKLVIHEQITRDLKDYKATGPHVAVAKRLAARGVKIRPGTVISYIVLKGSGRIGDRAIPFDEFDPTKHKYDAEYYIENQVLPAVERILRAFGYRKEDLRYQKTRQVGLSAWLKPKGT

SEQ ID NO: 3120 - protein, 774 aa, synthetic construct
MILDTDMITEDGKPVIRIFKKENGEFKIEYDRTFEPYFYALLKDDSAIEEVKKITAERHGTVVTVKRVEKVQKKFLGRPVEVWKLYFTHIQDVPAIRDKIREHPAVIDIYEYDIPFAKRYLIDKGLVPMEGDEELKMLAFDIETLYHEGEEFAEGPILMISYADEEGARVITWKNVDLPYVDVVSTEREMIKRFLRVVKEKDPDVLITYNGDNFDFAYLKKRCEKLGINFALGRDGSEPKIQRMGDRFAVEVKGRIHFDLYPVIRRTINLPTYTLEAVYEAVFGQPKEKVYAEEITTAWETGENLERVARYSMEDAKVTYELGKEFLPMEAQLSRLIGQSLWDVSRSSTGNLVEWFLLRKAYERNELAPNKPDEKELARRRQSYEGGYVKEPERGLWENIVYLDFRSLYPSIIITHNVSPDTLNREGCKEYDVAPQVGHRFCKDFPGFIPSLLGDLLEERQKIKKKMKATIDPIERKLLDYRQRAIKILANSYYGYYGYARARWYCKECAESVTAWGREYITMTIKEIEEKYGFKVIYSDTDGFFATIPGADAETVKKKAMEFLKYINAKLPGALELEYEGFYKRGFFVTKKKYAVIDEEGKITTRGLEIVRRDWSEIAKETQARVLEALLKDGDVEKAVRIVKEVTEKLSKYEVPPEKLVIHEQITRDLKDYKATGPHVAVAKRLAARGVKIRPGTVISYIVLKGSGRIGDRAIPFDEFDPTKHKYDAEYYIENQVLPAVERILRAFGYRKEDLRYQKTRQVGLSAWLKPKGT

SEQ ID NO: 3121 - protein, 774 aa, synthetic construct
MILDTDMITEDGKPVIRIFKKENGEFKIEYDRTFEPYFYALLKDDSAIEEVKKITAERHGTVVTVKRVEKVQKKFLGRPVEVWKLYFTHIQDVPAIADKIREHPAVIDIYEYDIPFAKRYLIDKGLVPMEGDEELKMLAFDIETLYHEGEEFAEGPILMISYADEEGARVITWKNVDLPYVDVVSTEREMIKRFLRVVKEKDPDVLITYNGDNFDFAYLKKRCEKLGINFALGRDGSEPKIQRMGDRFAVEVKGRIHFDLYPVIRRTINLPTYTLEAVYEAVFGQPKEKVYAEEITTAWETGENLERVARYSMEDAKVTYELGKEFLPMEAQLSRLIGQSLWDVSRSSTGNLVEWFLLRKAYERNELAPNKPDEKELARRRQSYEGGYVKEPERGLWENIVYLDFRSLYPSIIITHNVSPDTLNREGCKEYDVAPQVGHRFCKDFPGFIPSLLGDLLEERQKIKKKMKATIDPIERKLLDYRQRAIKILANSYYGYYGYARARWYCKECAESVTAWGREYITMTIKEIEEKYGFKVIYSDTDGFFATIPGADAETVKKKAMEFLKYINAKLPGALELEYEGFYKRGFFVTKKKYAVIDEEGKITTRGLEIVRRDWSEIAKETQARVLEALLKDGDVEKAVRIVKEVTEKLSKYEVPPEKLVIHEQITRDLKDYKATGPHVAVAKRLAARGVKIRPGTVISYIVLKGSGRIGDRAIPFDEFDPTKHKYDAEYYIENQVLPAVERILRAFGYRKEDLRYQKTRQVGLSAWLKPKGT

SEQ ID NO: 3122 - protein, 774 aa, synthetic construct
MILDTDMITEDGKPVIRIFKKENGEFKIEYDRTFEPYFYALLKDDSAIEEVKKITAERHGTVVTVKRVEKVQKKFLGRPVEVWKLYFTHIQDVPAIFDKIREHPAVIDIYEYDIPFAKRYLIDKGLVPMEGDEELKMLAFDIETLYHEGEEFAEGPILMISYADEEGARVITWKNVDLPYVDVVSTEREMIKRFLRVVKEKDPDVLITYNGDNFDFAYLKKRCEKLGINFALGRDGSEPKIQRMGDRFAVEVKGRIHFDLYPVIRRTINLPTYTLEAVYEAVFGQPKEKVYAEEITTAWETGENLERVARYSMEDAKVTYELGKEFLPMEAQLSRLIGQSLWDVSRSSTGNLVEWFLLRKAYERNELAPNKPDEKELARRRQSYEGGYVKEPERGLWENIVYLDFRSLYPSIIITHNVSPDTLNREGCKEYDVAPQVGHRFCKDFPGFIPSLLGDLLEERQKIKKKMKATIDPIERKLLDYRQRAIKILANSYYGYYGYARARWYCKECAESVTAWGREYITMTIKEIEEKYGFKVIYSDTDGFFATIPGADAETVKKKAMEFLKYINAKLPGALELEYEGFYKRGFFVTKKKYAVIDEEGKITTRGLEIVRRDWSEIAKETQARVLEALLKDGDVEKAVRIVKEVTEKLSKYEVPPEKLVIHEQITRDLKDYKATGPHVAVAKRLAARGVKIRPGTVISYIVLKGSGRIGDRAIPFDEFDPTKHKYDAEYYIENQVLPAVERILRAFGYRKEDLRYQKTRQVGLSAWLKPKGT

SEQ ID NO: 3123 - protein, 774 aa, synthetic construct
MILDTDMITEDGKPVIRIFKKENGEFKIEYDRTFEPYFYALLKDDSAIEEVKKITAERHGTVVTVKRVEKVQKKFLGRPVEVWKLYFTHIQDIPAIRDKIREHPAVIDIYEYDIPFAKRYLIDKGLVPMEGDEELKMLAFDIETLYHEGEEFAEGPILMISYADEEGARVITWKNVDLPYVDVVSTEREMIKRFLRVVKEKDPDVLITYNGDNFDFAYLKKRCEKLGINFALGRDGSEPKIQRMGDRFAVEVKGRIHFDLYPVIRRTINLPTYTLEAVYEAVFGQPKEKVYAEEITTAWETGENLERVARYSMEDAKVTYELGKEFLPMEAQLSRLIGQSLWDVSRSSTGNLVEWFLLRKAYERNELAPNKPDEKELARRRQSYEGGYVKEPERGLWENIVYLDFRSLYPSIIITHNVSPDTLNREGCKEYDVAPQVGHRFCKDFPGFIPSLLGDLLEERQKIKKKMKATIDPIERKLLDYRQRAIKILANSYYGYYGYARARWYCKECAESVTAWGREYITMTIKEIEEKYGFKVIYSDTDGFFATIPGADAETVKKKAMEFLKYINAKLPGALELEYEGFYKRGFFVTKKKYAVIDEEGKITTRGLEIVRRDWSEIAKETQARVLEALLKDGDVEKAVRIVKEVTEKLSKYEVPPEKLVIHEQITRDLKDYKATGPHVAVAKRLAARGVKIRPGTVISYIVLKGSGRIGDRAIPFDEFDPTKHKYDAEYYIENQVLPAVERILRAFGYRKEDLRYQKTRQVGLSAWLKPKGT

SEQ ID NO: 3124 - protein, 774 aa, synthetic construct
MILDTDMITEDGKPVIRIFKKENGEFKIEYDRTFEPYFYALLKDDSAIEEVKKITAERHGTVVTVKRVEKVQKKFLGRPVEVWKLYFTHIQDIPAIADKIREHPAVIDIYEYDIPFAKRYLIDKGLVPMEGDEELKMLAFDIETLYHEGEEFAEGPILMISYADEEGARVITWKNVDLPYVDVVSTEREMIKRFLRVVKEKDPDVLITYNGDNFDFAYLKKRCEKLGINFALGRDGSEPKIQRMGDRFAVEVKGRIHFDLYPVIRRTINLPTYTLEAVYEAVFGQPKEKVYAEEITTAWETGENLERVARYSMEDAKVTYELGKEFLPMEAQLSRLIGQSLWDVSRSSTGNLVEWFLLRKAYERNELAPNKPDEKELARRRQSYEGGYVKEPERGLWENIVYLDFRSLYPSIIITHNVSPDTLNREGCKEYDVAPQVGHRFCKDFPGFIPSLLGDLLEERQKIKKKMKATIDPIERKLLDYRQRAIKILANSYYGYYGYARARWYCKECAESVTAWGREYITMTIKEIEEKYGFKVIYSDTDGFFATIPGADAETVKKKAMEFLKYINAKLPGALELEYEGFYKRGFFVTKKKYAVIDEEGKITTRGLEIVRRDWSEIAKETQARVLEALLKDGDVEKAVRIVKEVTEKLSKYEVPPEKLVIHEQITRDLKDYKATGPHVAVAKRLAARGVKIRPGTVISYIVLKGSGRIGDRAIPFDEFDPTKHKYDAEYYIENQVLPAVERILRAFGYRKEDLRYQKTRQVGLSAWLKPKGT

SEQ ID NO: 3125 - protein, 774 aa, synthetic construct
MILDTDMITEDGKPVIRIFKKENGEFKIEYDRTFEPYFYALLKDDSAIEEVKKITAERHGTVVTVKRVEKVQKKFLGRPVEVWKLYFTHIQDIPAIHDKIREHPAVIDIYEYDIPFAKRYLIDKGLVPMEGDEELKMLAFDIETLYHEGEEFAEGPILMISYADEEGARVITWKNVDLPYVDVVSTEREMIKRFLRVVKEKDPDVLITYNGDNFDFAYLKKRCEKLGINFALGRDGSEPKIQRMGDRFAVEVKGRIHFDLYPVIRRTINLPTYTLEAVYEAVFGQPKEKVYAEEITTAWETGENLERVARYSMEDAKVTYELGKEFLPMEAQLSRLIGQSLWDVSRSSTGNLVEWFLLRKAYERNELAPNKPDEKELARRRQSYEGGYVKEPERGLWENIVYLDFRSLYPSIIITHNVSPDTLNREGCKEYDVAPQVGHRFCKDFPGFIPSLLGDLLEERQKIKKKMKATIDPIERKLLDYRQRAIKILANSYYGYYGYARARWYCKECAESVTAWGREYITMTIKEIEEKYGFKVIYSDTDGFFATIPGADAETVKKKAMEFLKYINAKLPGALELEYEGFYKRGFFVTKKKYAVIDEEGKITTRGLEIVRRDWSEIAKETQARVLEALLKDGDVEKAVRIVKEVTEKLSKYEVPPEKLVIHEQITRDLKDYKATGPHVAVAKRLAARGVKIRPGTVISYIVLKGSGRIGDRAIPFDEFDPTKHKYDAEYYIENQVLPAVERILRAFGYRKEDLRYQKTRQVGLSAWLKPKGT

SEQ ID NO: 3126 - protein, 774 aa, synthetic construct
MILDTDMITEDGKPVIRIFKKENGEFKIEYDRTFEPYFYALLKDDSAIEEVKKITAERHGTVVTVKRVEKVQKKFLGRPVEVWKLYFTHIQDIPAIWDKIREHPAVIDIYEYDIPFAKRYLIDKGLVPMEGDEELKMLAFDIETLYHEGEEFAEGPILMISYADEEGARVITWKNVDLPYVDVVSTEREMIKRFLRVVKEKDPDVLITYNGDNFDFAYLKKRCEKLGINFALGRDGSEPKIQRMGDRFAVEVKGRIHFDLYPVIRRTINLPTYTLEAVYEAVFGQPKEKVYAEEITTAWETGENLERVARYSMEDAKVTYELGKEFLPMEAQLSRLIGQSLWDVSRSSTGNLVEWFLLRKAYERNELAPNKPDEKELARRRQSYEGGYVKEPERGLWENIVYLDFRSLYPSIIITHNVSPDTLNREGCKEYDVAPQVGHRFCKDFPGFIPSLLGDLLEERQKIKKKMKATIDPIERKLLDYRQRAIKILANSYYGYYGYARARWYCKECAESVTAWGREYITMTIKEIEEKYGFKVIYSDTDGFFATIPGADAETVKKKAMEFLKYINAKLPGALELEYEGFYKRGFFVTKKKYAVIDEEGKITTRGLEIVRRDWSEIAKETQARVLEALLKDGDVEKAVRIVKEVTEKLSKYEVPPEKLVIHEQITRDLKDYKATGPHVAVAKRLAARGVKIRPGTVISYIVLKGSGRIGDRAIPFDEFDPTKHKYDAEYYIENQVLPAVERILRAFGYRKEDLRYQKTRQVGLSAWLKPKGT

SEQ ID NO: 3127 - protein, 774 aa, synthetic construct
MILDTDMITEDGKPVIRIFKKENGEFKIEYDRTFEPYFYALLKDDSAIEEVKKITAERHGTVVTVKRVEKVQKKFLGRPVEVWKLYFTHIQDKPAIRDKIREHPAVIDIYEYDIPFAKRYLIDKGLVPMEGDEELKMLAFDIETLYHEGEEFAEGPILMISYADEEGARVITWKNVDLPYVDVVSTEREMIKRFLRVVKEKDPDVLITYNGDNFDFAYLKKRCEKLGINFALGRDGSEPKIQRMGDRFAVEVKGRIHFDLYPVIRRTINLPTYTLEAVYEAVFGQPKEKVYAEEITTAWETGENLERVARYSMEDAKVTYELGKEFLPMEAQLSRLIGQSLWDVSRSSTGNLVEWFLLRKAYERNELAPNKPDEKELARRRQSYEGGYVKEPERGLWENIVYLDFRSLYPSIIITHNVSPDTLNREGCKEYDVAPQVGHRFCKDFPGFIPSLLGDLLEERQKIKKKMKATIDPIERKLLDYRQRAIKILANSYYGYYGYARARWYCKECAESVTAWGREYITMTIKEIEEKYGFKVIYSDTDGFFATIPGADAETVKKKAMEFLKYINAKLPGALELEYEGFYKRGFFVTKKKYAVIDEEGKITTRGLEIVRRDWSEIAKETQARVLEALLKDGDVEKAVRIVKEVTEKLSKYEVPPEKLVIHEQITRDLKDYKATGPHVAVAKRLAARGVKIRPGTVISYIVLKGSGRIGDRAIPFDEFDPTKHKYDAEYYIENQVLPAVERILRAFGYRKEDLRYQKTRQVGLSAWLKPKGT

SEQ ID NO: 3128 - protein, 774 aa, synthetic construct
MILDTDMITEDGKPVIRIFKKENGEFKIEYDRTFEPYFYALLKDDSAIEEVKKITAERHGTVVTVKRVEKVQKKFLGRPVEVWKLYFTHIQDQPAIRDKIREHPAVIDIYEYDIPFAKRYLIDKGLVPMEGDEELKMLAFDIETLYHEGEEFAEGPILMISYADEEGARVITWKNVDLPYVDVVSTEREMIKRFLRVVKEKDPDVLITYNGDNFDFAYLKKRCEKLGINFALGRDGSEPKIQRMGDRFAVEVKGRIHFDLYPVIRRTINLPTYTLEAVYEAVFGQPKEKVYAEEITTAWETGENLERVARYSMEDAKVTYELGKEFLPMEAQLSRLIGQSLWDVSRSSTGNLVEWFLLRKAYERNELAPNKPDEKELARRRQSYEGGYVKEPERGLWENIVYLDFRSLYPSIIITHNVSPDTLNREGCKEYDVAPQVGHRFCKDFPGFIPSLLGDLLEERQKIKKKMKATIDPIERKLLDYRQRAIKILANSYYGYYGYARARWYCKECAESVTAWGREYITMTIKEIEEKYGFKVIYSDTDGFFATIPGADAETVKKKAMEFLKYINAKLPGALELEYEGFYKRGFFVTKKKYAVIDEEGKITTRGLEIVRRDWSEIAKETQARVLEALLKDGDVEKAVRIVKEVTEKLSKYEVPPEKLVIHEQITRDLKDYKATGPHVAVAKRLAARGVKIRPGTVISYIVLKGSGRIGDRAIPFDEFDPTKHKYDAEYYIENQVLPAVERILRAFGYRKEDLRYQKTRQVGLSAWLKPKGT

SEQ ID NO: 3129 - protein, 774 aa, synthetic construct
MILDTDMITEDGKPVIRIFKKENGEFKIEYDRTFEPYFYALLKDDSAIEEVKKITAERHGTVVTVKRVEKVQKKFLGRPVEVWKLYFTHIQDRPAIADKIREHPAVIDIYEYDIPFAKRYLIDKGLVPMEGDEELKMLAFDIETLYHEGEEFAEGPILMISYADEEGARVITWKNVDLPYVDVVSTEREMIKRFLRVVKEKDPDVLITYNGDNFDFAYLKKRCEKLGINFALGRDGSEPKIQRMGDRFAVEVKGRIHFDLYPVIRRTINLPTYTLEAVYEAVFGQPKEKVYAEEITTAWETGENLERVARYSMEDAKVTYELGKEFLPMEAQLSRLIGQSLWDVSRSSTGNLVEWFLLRKAYERNELAPNKPDEKELARRRQSYEGGYVKEPERGLWENIVYLDFRSLYPSIIITHNVSPDTLNREGCKEYDVAPQVGHRFCKDFPGFIPSLLGDLLEERQKIKKKMKATIDPIERKLLDYRQRAIKILANSYYGYYGYARARWYCKECAESVTAWGREYITMTIKEIEEKYGFKVIYSDTDGFFATIPGADAETVKKKAMEFLKYINAKLPGALELEYEGFYKRGFFVTKKKYAVIDEEGKITTRGLEIVRRDWSEIAKETQARVLEALLKDGDVEKAVRIVKEVTEKLSKYEVPPEKLVIHEQITRDLKDYKATGPHVAVAKRLAARGVKIRPGTVISYIVLKGSGRIGDRAIPFDEFDPTKHKYDAEYYIENQVLPAVERILRAFGYRKEDLRYQKTRQVGLSAWLKPKGT

SEQ ID NO: 3130 - protein, 774 aa, synthetic construct
MILDTDMITEDGKPVIRIFKKENGEFKIEYDRTFEPYFYALLKDDSAIEEVKKITAERHGTVVTVKRVEKVQKKFLGRPVEVWKLYFTHIQDRPAIWDKIREHPAVIDIYEYDIPFAKRYLIDKGLVPMEGDEELKMLAFDIETLYHEGEEFAEGPILMISYADEEGARVITWKNVDLPYVDVVSTEREMIKRFLRVVKEKDPDVLITYNGDNFDFAYLKKRCEKLGINFALGRDGSEPKIQRMGDRFAVEVKGRIHFDLYPVIRRTINLPTYTLEAVYEAVFGQPKEKVYAEEITTAWETGENLERVARYSMEDAKVTYELGKEFLPMEAQLSRLIGQSLWDVSRSSTGNLVEWFLLRKAYERNELAPNKPDEKELARRRQSYEGGYVKEPERGLWENIVYLDFRSLYPSIIITHNVSPDTLNREGCKEYDVAPQVGHRFCKDFPGFIPSLLGDLLEERQKIKKKMKATIDPIERKLLDYRQRAIKILANSYYGYYGYARARWYCKECAESVTAWGREYITMTIKEIEEKYGFKVIYSDTDGFFATIPGADAETVKKKAMEFLKYINAKLPGALELEYEGFYKRGFFVTKKKYAVIDEEGKITTRGLEIVRRDWSEIAKETQARVLEALLKDGDVEKAVRIVKEVTEKLSKYEVPPEKLVIHEQITRDLKDYKATGPHVAVAKRLAARGVKIRPGTVISYIVLKGSGRIGDRAIPFDEFDPTKHKYDAEYYIENQVLPAVERILRAFGYRKEDLRYQKTRQVGLSAWLKPKGT

SEQ ID NO: 3131 - protein, 774 aa, synthetic construct
MILDTDMITEDGKPVIRIFKKENGEFKIEYDRTFEPYFYALLKDDSAIEEVKKITAERHGTVVTVKRVEKVQKKFLGRPVEVWKLYFTHSQDVPAIHDKIREHPAVIDIYEYDIPFAKRYLIDKGLVPMEGDEELKMLAFDIETLYHEGEEFAEGPILMISYADEEGARVITWKNVDLPYVDVVSTEREMIKRFLRVVKEKDPDVLITYNGDNFDFAYLKKRCEKLGINFALGRDGSEPKIQRMGDRFAVEVKGRIHFDLYPVIRRTINLPTYTLEAVYEAVFGQPKEKVYAEEITTAWETGENLERVARYSMEDAKVTYELGKEFLPMEAQLSRLIGQSLWDVSRSSTGNLVEWFLLRKAYERNELAPNKPDEKELARRRQSYEGGYVKEPERGLWENIVYLDFRSLYPSIIITHNVSPDTLNREGCKEYDVAPQVGHRFCKDFPGFIPSLLGDLLEERQKIKKKMKATIDPIERKLLDYRQRAIKILANSYYGYYGYARARWYCKECAESVTAWGREYITMTIKEIEEKYGFKVIYSDTDGFFATIPGADAETVKKKAMEFLKYINAKLPGALELEYEGFYKRGFFVTKKKYAVIDEEGKITTRGLEIVRRDWSEIAKETQARVLEALLKDGDVEKAVRIVKEVTEKLSKYEVPPEKLVIHEQITRDLKDYKATGPHVAVAKRLAARGVKIRPGTVISYIVLKGSGRIGDRAIPFDEFDPTKHKYDAEYYIENQVLPAVERILRAFGYRKEDLRYQKTRQVGLSAWLKPKGT

SEQ ID NO: 3132 - protein, 774 aa, synthetic construct
MILDTDMITEDGKPVIRIFKKENGEFKIEYDRTFEPYFYALLKDDSAIEEVKKITAERHGTVVTVKRVEKVQKKFLGRPVEVWKLYFTHSQDIPAIRDKIREHPAVIDIYEYDIPFAKRYLIDKGLVPMEGDEELKMLAFDIETLYHEGEEFAEGPILMISYADEEGARVITWKNVDLPYVDVVSTEREMIKRFLRVVKEKDPDVLITYNGDNFDFAYLKKRCEKLGINFALGRDGSEPKIQRMGDRFAVEVKGRIHFDLYPVIRRTINLPTYTLEAVYEAVFGQPKEKVYAEEITTAWETGENLERVARYSMEDAKVTYELGKEFLPMEAQLSRLIGQSLWDVSRSSTGNLVEWFLLRKAYERNELAPNKPDEKELARRRQSYEGGYVKEPERGLWENIVYLDFRSLYPSIIITHNVSPDTLNREGCKEYDVAPQVGHRFCKDFPGFIPSLLGDLLEERQKIKKKMKATIDPIERKLLDYRQRAIKILANSYYGYYGYARARWYCKECAESVTAWGREYITMTIKEIEEKYGFKVIYSDTDGFFATIPGADAETVKKKAMEFLKYINAKLPGALELEYEGFYKRGFFVTKKKYAVIDEEGKITTRGLEIVRRDWSEIAKETQARVLEALLKDGDVEKAVRIVKEVTEKLSKYEVPPEKLVIHEQITRDLKDYKATGPHVAVAKRLAARGVKIRPGTVISYIVLKGSGRIGDRAIPFDEFDPTKHKYDAEYYIENQVLPAVERILRAFGYRKEDLRYQKTRQVGLSAWLKPKGT

SEQ ID NO: 3133 - protein, 774 aa, synthetic construct
MILDTDMITEDGKPVIRIFKKENGEFKIEYDRTFEPYFYALLKDDSAIEEVKKITAERHGTVVTVKRVEKVQKKFLGRPVEVWKLYFTHSQDIPAIFDKIREHPAVIDIYEYDIPFAKRYLIDKGLVPMEGDEELKMLAFDIETLYHEGEEFAEGPILMISYADEEGARVITWKNVDLPYVDVVSTEREMIKRFLRVVKEKDPDVLITYNGDNFDFAYLKKRCEKLGINFALGRDGSEPKIQRMGDRFAVEVKGRIHFDLYPVIRRTINLPTYTLEAVYEAVFGQPKEKVYAEEITTAWETGENLERVARYSMEDAKVTYELGKEFLPMEAQLSRLIGQSLWDVSRSSTGNLVEWFLLRKAYERNELAPNKPDEKELARRRQSYEGGYVKEPERGLWENIVYLDFRSLYPSIIITHNVSPDTLNREGCKEYDVAPQVGHRFCKDFPGFIPSLLGDLLEERQKIKKKMKATIDPIERKLLDYRQRAIKILANSYYGYYGYARARWYCKECAESVTAWGREYITMTIKEIEEKYGFKVIYSDTDGFFATIPGADAETVKKKAMEFLKYINAKLPGALELEYEGFYKRGFFVTKKKYAVIDEEGKITTRGLEIVRRDWSEIAKETQARVLEALLKDGDVEKAVRIVKEVTEKLSKYEVPPEKLVIHEQITRDLKDYKATGPHVAVAKRLAARGVKIRPGTVISYIVLKGSGRIGDRAIPFDEFDPTKHKYDAEYYIENQVLPAVERILRAFGYRKEDLRYQKTRQVGLSAWLKPKGT

SEQ ID NO: 3134 - protein, 774 aa, synthetic construct
MILDTDMITEDGKPVIRIFKKENGEFKIEYDRTFEPYFYALLKDDSAIEEVKKITAERHGTVVTVKRVEKVQKKFLGRPVEVWKLYFTHSQDIPAIHDKIREHPAVIDIYEYDIPFAKRYLIDKGLVPMEGDEELKMLAFDIETLYHEGEEFAEGPILMISYADEEGARVITWKNVDLPYVDVVSTEREMIKRFLRVVKEKDPDVLITYNGDNFDFAYLKKRCEKLGINFALGRDGSEPKIQRMGDRFAVEVKGRIHFDLYPVIRRTINLPTYTLEAVYEAVFGQPKEKVYAEEITTAWETGENLERVARYSMEDAKVTYELGKEFLPMEAQLSRLIGQSLWDVSRSSTGNLVEWFLLRKAYERNELAPNKPDEKELARRRQSYEGGYVKEPERGLWENIVYLDFRSLYPSIIITHNVSPDTLNREGCKEYDVAPQVGHRFCKDFPGFIPSLLGDLLEERQKIKKKMKATIDPIERKLLDYRQRAIKILANSYYGYYGYARARWYCKECAESVTAWGREYITMTIKEIEEKYGFKVIYSDTDGFFATIPGADAETVKKKAMEFLKYINAKLPGALELEYEGFYKRGFFVTKKKYAVIDEEGKITTRGLEIVRRDWSEIAKETQARVLEALLKDGDVEKAVRIVKEVTEKLSKYEVPPEKLVIHEQITRDLKDYKATGPHVAVAKRLAARGVKIRPGTVISYIVLKGSGRIGDRAIPFDEFDPTKHKYDAEYYIENQVLPAVERILRAFGYRKEDLRYQKTRQVGLSAWLKPKGT

SEQ ID NO: 3135 - protein, 774 aa, synthetic construct
MILDTDMITEDGKPVIRIFKKENGEFKIEYDRTFEPYFYALLKDDSAIEEVKKITAERHGTVVTVKRVEKVQKKFLGRPVEVWKLYFTHSQDIPAIWDKIREHPAVIDIYEYDIPFAKRYLIDKGLVPMEGDEELKMLAFDIETLYHEGEEFAEGPILMISYADEEGARVITWKNVDLPYVDVVSTEREMIKRFLRVVKEKDPDVLITYNGDNFDFAYLKKRCEKLGINFALGRDGSEPKIQRMGDRFAVEVKGRIHFDLYPVIRRTINLPTYTLEAVYEAVFGQPKEKVYAEEITTAWETGENLERVARYSMEDAKVTYELGKEFLPMEAQLSRLIGQSLWDVSRSSTGNLVEWFLLRKAYERNELAPNKPDEKELARRRQSYEGGYVKEPERGLWENIVYLDFRSLYPSIIITHNVSPDTLNREGCKEYDVAPQVGHRFCKDFPGFIPSLLGDLLEERQKIKKKMKATIDPIERKLLDYRQRAIKILANSYYGYYGYARARWYCKECAESVTAWGREYITMTIKEIEEKYGFKVIYSDTDGFFATIPGADAETVKKKAMEFLKYINAKLPGALELEYEGFYKRGFFVTKKKYAVIDEEGKITTRGLEIVRRDWSEIAKETQARVLEALLKDGDVEKAVRIVKEVTEKLSKYEVPPEKLVIHEQITRDLKDYKATGPHVAVAKRLAARGVKIRPGTVISYIVLKGSGRIGDRAIPFDEFDPTKHKYDAEYYIENQVLPAVERILRAFGYRKEDLRYQKTRQVGLSAWLKPKGT

SEQ ID NO: 3136 - protein, 774 aa, synthetic construct
MILDTDMITEDGKPVIRIFKKENGEFKIEYDRTFEPYFYALLKDDSAIEEVKKITAERHGTVVTVKRVEKVQKKFLGRPVEVWKLYFTHSQDQPAIRDKIREHPAVIDIYEYDIPFAKRYLIDKGLVPMEGDEELKMLAFDIETLYHEGEEFAEGPILMISYADEEGARVITWKNVDLPYVDVVSTEREMIKRFLRVVKEKDPDVLITYNGDNFDFAYLKKRCEKLGINFALGRDGSEPKIQRMGDRFAVEVKGRIHFDLYPVIRRTINLPTYTLEAVYEAVFGQPKEKVYAEEITTAWETGENLERVARYSMEDAKVTYELGKEFLPMEAQLSRLIGQSLWDVSRSSTGNLVEWFLLRKAYERNELAPNKPDEKELARRRQSYEGGYVKEPERGLWENIVYLDFRSLYPSIIITHNVSPDTLNREGCKEYDVAPQVGHRFCKDFPGFIPSLLGDLLEERQKIKKKMKATIDPIERKLLDYRQRAIKILANSYYGYYGYARARWYCKECAESVTAWGREYITMTIKEIEEKYGFKVIYSDTDGFFATIPGADAETVKKKAMEFLKYINAKLPGALELEYEGFYKRGFFVTKKKYAVIDEEGKITTRGLEIVRRDWSEIAKETQARVLEALLKDGDVEKAVRIVKEVTEKLSKYEVPPEKLVIHEQITRDLKDYKATGPHVAVAKRLAARGVKIRPGTVISYIVLKGSGRIGDRAIPFDEFDPTKHKYDAEYYIENQVLPAVERILRAFGYRKEDLRYQKTRQVGLSAWLKPKGT

SEQ ID NO: 3137 - protein, 774 aa, synthetic construct
MILDTDMITEDGKPVIRIFKKENGEFKIEYDRTFEPYFYALLKDDSAIEEVKKITAERHGTVVTVKRVEKVQKKFLGRPVEVWKLYFTHSQDQPAIADKIREHPAVIDIYEYDIPFAKRYLIDKGLVPMEGDEELKMLAFDIETLYHEGEEFAEGPILMISYADEEGARVITWKNVDLPYVDVVSTEREMIKRFLRVVKEKDPDVLITYNGDNFDFAYLKKRCEKLGINFALGRDGSEPKIQRMGDRFAVEVKGRIHFDLYPVIRRTINLPTYTLEAVYEAVFGQPKEKVYAEEITTAWETGENLERVARYSMEDAKVTYELGKEFLPMEAQLSRLIGQSLWDVSRSSTGNLVEWFLLRKAYERNELAPNKPDEKELARRRQSYEGGYVKEPERGLWENIVYLDFRSLYPSIIITHNVSPDTLNREGCKEYDVAPQVGHRFCKDFPGFIPSLLGDLLEERQKIKKKMKATIDPIERKLLDYRQRAIKILANSYYGYYGYARARWYCKECAESVTAWGREYITMTIKEIEEKYGFKVIYSDTDGFFATIPGADAETVKKKAMEFLKYINAKLPGALELEYEGFYKRGFFVTKKKYAVIDEEGKITTRGLEIVRRDWSEIAKETQARVLEALLKDGDVEKAVRIVKEVTEKLSKYEVPPEKLVIHEQITRDLKDYKATGPHVAVAKRLAARGVKIRPGTVISYIVLKGSGRIGDRAIPFDEFDPTKHKYDAEYYIENQVLPAVERILRAFGYRKEDLRYQKTRQVGLSAWLKPKGT

SEQ ID NO: 3138 - protein, 774 aa, synthetic construct
MILDTDMITEDGKPVIRIFKKENGEFKIEYDRTFEPYFYALLKDDSAIEEVKKITAERHGTVVTVKRVEKVQKKFLGRPVEVWKLYFTHWQDVPAIRDKIREHPAVIDIYEYDIPFAKRYLIDKGLVPMEGDEELKMLAFDIETLYHEGEEFAEGPILMISYADEEGARVITWKNVDLPYVDVVSTEREMIKRFLRVVKEKDPDVLITYNGDNFDFAYLKKRCEKLGINFALGRDGSEPKIQRMGDRFAVEVKGRIHFDLYPVIRRTINLPTYTLEAVYEAVFGQPKEKVYAEEITTAWETGENLERVARYSMEDAKVTYELGKEFLPMEAQLSRLIGQSLWDVSRSSTGNLVEWFLLRKAYERNELAPNKPDEKELARRRQSYEGGYVKEPERGLWENIVYLDFRSLYPSIIITHNVSPDTLNREGCKEYDVAPQVGHRFCKDFPGFIPSLLGDLLEERQKIKKKMKATIDPIERKLLDYRQRAIKILANSYYGYYGYARARWYCKECAESVTAWGREYITMTIKEIEEKYGFKVIYSDTDGFFATIPGADAETVKKKAMEFLKYINAKLPGALELEYEGFYKRGFFVTKKKYAVIDEEGKITTRGLEIVRRDWSEIAKETQARVLEALLKDGDVEKAVRIVKEVTEKLSKYEVPPEKLVIHEQITRDLKDYKATGPHVAVAKRLAARGVKIRPGTVISYIVLKGSGRIGDRAIPFDEFDPTKHKYDAEYYIENQVLPAVERILRAFGYRKEDLRYQKTRQVGLSAWLKPKGT

SEQ ID NO: 3139 - protein, 774 aa, synthetic construct
MILDTDMITEDGKPVIRIFKKENGEFKIEYDRTFEPYFYALLKDDSAIEEVKKITAERHGTVVTVKRVEKVQKKFLGRPVEVWKLYFTHWQDVPAIADKIREHPAVIDIYEYDIPFAKRYLIDKGLVPMEGDEELKMLAFDIETLYHEGEEFAEGPILMISYADEEGARVITWKNVDLPYVDVVSTEREMIKRFLRVVKEKDPDVLITYNGDNFDFAYLKKRCEKLGINFALGRDGSEPKIQRMGDRFAVEVKGRIHFDLYPVIRRTINLPTYTLEAVYEAVFGQPKEKVYAEEITTAWETGENLERVARYSMEDAKVTYELGKEFLPMEAQLSRLIGQSLWDVSRSSTGNLVEWFLLRKAYERNELAPNKPDEKELARRRQSYEGGYVKEPERGLWENIVYLDFRSLYPSIIITHNVSPDTLNREGCKEYDVAPQVGHRFCKDFPGFIPSLLGDLLEERQKIKKKMKATIDPIERKLLDYRQRAIKILANSYYGYYGYARARWYCKECAESVTAWGREYITMTIKEIEEKYGFKVIYSDTDGFFATIPGADAETVKKKAMEFLKYINAKLPGALELEYEGFYKRGFFVTKKKYAVIDEEGKITTRGLEIVRRDWSEIAKETQARVLEALLKDGDVEKAVRIVKEVTEKLSKYEVPPEKLVIHEQITRDLKDYKATGPHVAVAKRLAARGVKIRPGTVISYIVLKGSGRIGDRAIPFDEFDPTKHKYDAEYYIENQVLPAVERILRAFGYRKEDLRYQKTRQVGLSAWLKPKGT

SEQ ID NO: 3140 - protein, 774 aa, synthetic construct
MILDTDMITEDGKPVIRIFKKENGEFKIEYDRTFEPYFYALLKDDSAIEEVKKITAERHGTVVTVKRVEKVQKKFLGRPVEVWKLYFTHWQDVPAIFDKIREHPAVIDIYEYDIPFAKRYLIDKGLVPMEGDEELKMLAFDIETLYHEGEEFAEGPILMISYADEEGARVITWKNVDLPYVDVVSTEREMIKRFLRVVKEKDPDVLITYNGDNFDFAYLKKRCEKLGINFALGRDGSEPKIQRMGDRFAVEVKGRIHFDLYPVIRRTINLPTYTLEAVYEAVFGQPKEKVYAEEITTAWETGENLERVARYSMEDAKVTYELGKEFLPMEAQLSRLIGQSLWDVSRSSTGNLVEWFLLRKAYERNELAPNKPDEKELARRRQSYEGGYVKEPERGLWENIVYLDFRSLYPSIIITHNVSPDTLNREGCKEYDVAPQVGHRFCKDFPGFIPSLLGDLLEERQKIKKKMKATIDPIERKLLDYRQRAIKILANSYYGYYGYARARWYCKECAESVTAWGREYITMTIKEIEEKYGFKVIYSDTDGFFATIPGADAETVKKKAMEFLKYINAKLPGALELEYEGFYKRGFFVTKKKYAVIDEEGKITTRGLEIVRRDWSEIAKETQARVLEALLKDGDVEKAVRIVKEVTEKLSKYEVPPEKLVIHEQITRDLKDYKATGPHVAVAKRLAARGVKIRPGTVISYIVLKGSGRIGDRAIPFDEFDPTKHKYDAEYYIENQVLPAVERILRAFGYRKEDLRYQKTRQVGLSAWLKPKGT

SEQ ID NO: 3141 - protein, 774 aa, synthetic construct
MILDTDMITEDGKPVIRIFKKENGEFKIEYDRTFEPYFYALLKDDSAIEEVKKITAERHGTVVTVKRVEKVQKKFLGRPVEVWKLYFTHWQDVPAIHDKIREHPAVIDIYEYDIPFAKRYLIDKGLVPMEGDEELKMLAFDIETLYHEGEEFAEGPILMISYADEEGARVITWKNVDLPYVDVVSTEREMIKRFLRVVKEKDPDVLITYNGDNFDFAYLKKRCEKLGINFALGRDGSEPKIQRMGDRFAVEVKGRIHFDLYPVIRRTINLPTYTLEAVYEAVFGQPKEKVYAEEITTAWETGENLERVARYSMEDAKVTYELGKEFLPMEAQLSRLIGQSLWDVSRSSTGNLVEWFLLRKAYERNELAPNKPDEKELARRRQSYEGGYVKEPERGLWENIVYLDFRSLYPSIIITHNVSPDTLNREGCKEYDVAPQVGHRFCKDFPGFIPSLLGDLLEERQKIKKKMKATIDPIERKLLDYRQRAIKILANSYYGYYGYARARWYCKECAESVTAWGREYITMTIKEIEEKYGFKVIYSDTDGFFATIPGADAETVKKKAMEFLKYINAKLPGALELEYEGFYKRGFFVTKKKYAVIDEEGKITTRGLEIVRRDWSEIAKETQARVLEALLKDGDVEKAVRIVKEVTEKLSKYEVPPEKLVIHEQITRDLKDYKATGPHVAVAKRLAARGVKIRPGTVISYIVLKGSGRIGDRAIPFDEFDPTKHKYDAEYYIENQVLPAVERILRAFGYRKEDLRYQKTRQVGLSAWLKPKGT

SEQ ID NO: 3142 - protein, 774 aa, synthetic construct
MILDTDMITEDGKPVIRIFKKENGEFKIEYDRTFEPYFYALLKDDSAIEEVKKITAERHGTVVTVKRVEKVQKKFLGRPVEVWKLYFTHWQDVPAIWDKIREHPAVIDIYEYDIPFAKRYLIDKGLVPMEGDEELKMLAFDIETLYHEGEEFAEGPILMISYADEEGARVITWKNVDLPYVDVVSTEREMIKRFLRVVKEKDPDVLITYNGDNFDFAYLKKRCEKLGINFALGRDGSEPKIQRMGDRFAVEVKGRIHFDLYPVIRRTINLPTYTLEAVYEAVFGQPKEKVYAEEITTAWETGENLERVARYSMEDAKVTYELGKEFLPMEAQLSRLIGQSLWDVSRSSTGNLVEWFLLRKAYERNELAPNKPDEKELARRRQSYEGGYVKEPERGLWENIVYLDFRSLYPSIIITHNVSPDTLNREGCKEYDVAPQVGHRFCKDFPGFIPSLLGDLLEERQKIKKKMKATIDPIERKLLDYRQRAIKILANSYYGYYGYARARWYCKECAESVTAWGREYITMTIKEIEEKYGFKVIYSDTDGFFATIPGADAETVKKKAMEFLKYINAKLPGALELEYEGFYKRGFFVTKKKYAVIDEEGKITTRGLEIVRRDWSEIAKETQARVLEALLKDGDVEKAVRIVKEVTEKLSKYEVPPEKLVIHEQITRDLKDYKATGPHVAVAKRLAARGVKIRPGTVISYIVLKGSGRIGDRAIPFDEFDPTKHKYDAEYYIENQVLPAVERILRAFGYRKEDLRYQKTRQVGLSAWLKPKGT

SEQ ID NO: 3143 - protein, 774 aa, synthetic construct
MILDTDMITEDGKPVIRIFKKENGEFKIEYDRTFEPYFYALLKDDSAIEEVKKITAERHGTVVTVKRVEKVQKKFLGRPVEVWKLYFTHWQDIPAIRDKIREHPAVIDIYEYDIPFAKRYLIDKGLVPMEGDEELKMLAFDIETLYHEGEEFAEGPILMISYADEEGARVITWKNVDLPYVDVVSTEREMIKRFLRVVKEKDPDVLITYNGDNFDFAYLKKRCEKLGINFALGRDGSEPKIQRMGDRFAVEVKGRIHFDLYPVIRRTINLPTYTLEAVYEAVFGQPKEKVYAEEITTAWETGENLERVARYSMEDAKVTYELGKEFLPMEAQLSRLIGQSLWDVSRSSTGNLVEWFLLRKAYERNELAPNKPDEKELARRRQSYEGGYVKEPERGLWENIVYLDFRSLYPSIIITHNVSPDTLNREGCKEYDVAPQVGHRFCKDFPGFIPSLLGDLLEERQKIKKKMKATIDPIERKLLDYRQRAIKILANSYYGYYGYARARWYCKECAESVTAWGREYITMTIKEIEEKYGFKVIYSDTDGFFATIPGADAETVKKKAMEFLKYINAKLPGALELEYEGFYKRGFFVTKKKYAVIDEEGKITTRGLEIVRRDWSEIAKETQARVLEALLKDGDVEKAVRIVKEVTEKLSKYEVPPEKLVIHEQITRDLKDYKATGPHVAVAKRLAARGVKIRPGTVISYIVLKGSGRIGDRAIPFDEFDPTKHKYDAEYYIENQVLPAVERILRAFGYRKEDLRYQKTRQVGLSAWLKPKGT

SEQ ID NO: 3144 - protein, 774 aa, synthetic construct
MILDTDMITEDGKPVIRIFKKENGEFKIEYDRTFEPYFYALLKDDSAIEEVKKITAERHGTVVTVKRVEKVQKKFLGRPVEVWKLYFTHWQDIPAIADKIREHPAVIDIYEYDIPFAKRYLIDKGLVPMEGDEELKMLAFDIETLYHEGEEFAEGPILMISYADEEGARVITWKNVDLPYVDVVSTEREMIKRFLRVVKEKDPDVLITYNGDNFDFAYLKKRCEKLGINFALGRDGSEPKIQRMGDRFAVEVKGRIHFDLYPVIRRTINLPTYTLEAVYEAVFGQPKEKVYAEEITTAWETGENLERVARYSMEDAKVTYELGKEFLPMEAQLSRLIGQSLWDVSRSSTGNLVEWFLLRKAYERNELAPNKPDEKELARRRQSYEGGYVKEPERGLWENIVYLDFRSLYPSIIITHNVSPDTLNREGCKEYDVAPQVGHRFCKDFPGFIPSLLGDLLEERQKIKKKMKATIDPIERKLLDYRQRAIKILANSYYGYYGYARARWYCKECAESVTAWGREYITMTIKEIEEKYGFKVIYSDTDGFFATIPGADAETVKKKAMEFLKYINAKLPGALELEYEGFYKRGFFVTKKKYAVIDEEGKITTRGLEIVRRDWSEIAKETQARVLEALLKDGDVEKAVRIVKEVTEKLSKYEVPPEKLVIHEQITRDLKDYKATGPHVAVAKRLAARGVKIRPGTVISYIVLKGSGRIGDRAIPFDEFDPTKHKYDAEYYIENQVLPAVERILRAFGYRKEDLRYQKTRQVGLSAWLKPKGT

SEQ ID NO: 3145 - protein, 774 aa, synthetic construct
MILDTDMITEDGKPVIRIFKKENGEFKIEYDRTFEPYFYALLKDDSAIEEVKKITAERHGTVVTVKRVEKVQKKFLGRPVEVWKLYFTHWQDIPAIFDKIREHPAVIDIYEYDIPFAKRYLIDKGLVPMEGDEELKMLAFDIETLYHEGEEFAEGPILMISYADEEGARVITWKNVDLPYVDVVSTEREMIKRFLRVVKEKDPDVLITYNGDNFDFAYLKKRCEKLGINFALGRDGSEPKIQRMGDRFAVEVKGRIHFDLYPVIRRTINLPTYTLEAVYEAVFGQPKEKVYAEEITTAWETGENLERVARYSMEDAKVTYELGKEFLPMEAQLSRLIGQSLWDVSRSSTGNLVEWFLLRKAYERNELAPNKPDEKELARRRQSYEGGYVKEPERGLWENIVYLDFRSLYPSIIITHNVSPDTLNREGCKEYDVAPQVGHRFCKDFPGFIPSLLGDLLEERQKIKKKMKATIDPIERKLLDYRQRAIKILANSYYGYYGYARARWYCKECAESVTAWGREYITMTIKEIEEKYGFKVIYSDTDGFFATIPGADAETVKKKAMEFLKYINAKLPGALELEYEGFYKRGFFVTKKKYAVIDEEGKITTRGLEIVRRDWSEIAKETQARVLEALLKDGDVEKAVRIVKEVTEKLSKYEVPPEKLVIHEQITRDLKDYKATGPHVAVAKRLAARGVKIRPGTVISYIVLKGSGRIGDRAIPFDEFDPTKHKYDAEYYIENQVLPAVERILRAFGYRKEDLRYQKTRQVGLSAWLKPKGT

SEQ ID NO: 3146 - protein, 774 aa, synthetic construct
MILDTDMITEDGKPVIRIFKKENGEFKIEYDRTFEPYFYALLKDDSAIEEVKKITAERHGTVVTVKRVEKVQKKFLGRPVEVWKLYFTHWQDIPAIHDKIREHPAVIDIYEYDIPFAKRYLIDKGLVPMEGDEELKMLAFDIETLYHEGEEFAEGPILMISYADEEGARVITWKNVDLPYVDVVSTEREMIKRFLRVVKEKDPDVLITYNGDNFDFAYLKKRCEKLGINFALGRDGSEPKIQRMGDRFAVEVKGRIHFDLYPVIRRTINLPTYTLEAVYEAVFGQPKEKVYAEEITTAWETGENLERVARYSMEDAKVTYELGKEFLPMEAQLSRLIGQSLWDVSRSSTGNLVEWFLLRKAYERNELAPNKPDEKELARRRQSYEGGYVKEPERGLWENIVYLDFRSLYPSIIITHNVSPDTLNREGCKEYDVAPQVGHRFCKDFPGFIPSLLGDLLEERQKIKKKMKATIDPIERKLLDYRQRAIKILANSYYGYYGYARARWYCKECAESVTAWGREYITMTIKEIEEKYGFKVIYSDTDGFFATIPGADAETVKKKAMEFLKYINAKLPGALELEYEGFYKRGFFVTKKKYAVIDEEGKITTRGLEIVRRDWSEIAKETQARVLEALLKDGDVEKAVRIVKEVTEKLSKYEVPPEKLVIHEQITRDLKDYKATGPHVAVAKRLAARGVKIRPGTVISYIVLKGSGRIGDRAIPFDEFDPTKHKYDAEYYIENQVLPAVERILRAFGYRKEDLRYQKTRQVGLSAWLKPKGT

SEQ ID NO: 3147 - protein, 774 aa, synthetic construct
MILDTDMITEDGKPVIRIFKKENGEFKIEYDRTFEPYFYALLKDDSAIEEVKKITAERHGTVVTVKRVEKVQKKFLGRPVEVWKLYFTHWQDQPAIRDKIREHPAVIDIYEYDIPFAKRYLIDKGLVPMEGDEELKMLAFDIETLYHEGEEFAEGPILMISYADEEGARVITWKNVDLPYVDVVSTEREMIKRFLRVVKEKDPDVLITYNGDNFDFAYLKKRCEKLGINFALGRDGSEPKIQRMGDRFAVEVKGRIHFDLYPVIRRTINLPTYTLEAVYEAVFGQPKEKVYAEEITTAWETGENLERVARYSMEDAKVTYELGKEFLPMEAQLSRLIGQSLWDVSRSSTGNLVEWFLLRKAYERNELAPNKPDEKELARRRQSYEGGYVKEPERGLWENIVYLDFRSLYPSIIITHNVSPDTLNREGCKEYDVAPQVGHRFCKDFPGFIPSLLGDLLEERQKIKKKMKATIDPIERKLLDYRQRAIKILANSYYGYYGYARARWYCKECAESVTAWGREYITMTIKEIEEKYGFKVIYSDTDGFFATIPGADAETVKKKAMEFLKYINAKLPGALELEYEGFYKRGFFVTKKKYAVIDEEGKITTRGLEIVRRDWSEIAKETQARVLEALLKDGDVEKAVRIVKEVTEKLSKYEVPPEKLVIHEQITRDLKDYKATGPHVAVAKRLAARGVKIRPGTVISYIVLKGSGRIGDRAIPFDEFDPTKHKYDAEYYIENQVLPAVERILRAFGYRKEDLRYQKTRQVGLSAWLKPKGT

SEQ ID NO: 3148 - protein, 774 aa, synthetic construct
MILDTDMITEDGKPVIRIFKKENGEFKIEYDRTFEPYFYALLKDDSAIEEVKKITAERHGTVVTVKRVEKVQKKFLGRPVEVWKLYFTHWQDQPAIWDKIREHPAVIDIYEYDIPFAKRYLIDKGLVPMEGDEELKMLAFDIETLYHEGEEFAEGPILMISYADEEGARVITWKNVDLPYVDVVSTEREMIKRFLRVVKEKDPDVLITYNGDNFDFAYLKKRCEKLGINFALGRDGSEPKIQRMGDRFAVEVKGRIHFDLYPVIRRTINLPTYTLEAVYEAVFGQPKEKVYAEEITTAWETGENLERVARYSMEDAKVTYELGKEFLPMEAQLSRLIGQSLWDVSRSSTGNLVEWFLLRKAYERNELAPNKPDEKELARRRQSYEGGYVKEPERGLWENIVYLDFRSLYPSIIITHNVSPDTLNREGCKEYDVAPQVGHRFCKDFPGFIPSLLGDLLEERQKIKKKMKATIDPIERKLLDYRQRAIKILANSYYGYYGYARARWYCKECAESVTAWGREYITMTIKEIEEKYGFKVIYSDTDGFFATIPGADAETVKKKAMEFLKYINAKLPGALELEYEGFYKRGFFVTKKKYAVIDEEGKITTRGLEIVRRDWSEIAKETQARVLEALLKDGDVEKAVRIVKEVTEKLSKYEVPPEKLVIHEQITRDLKDYKATGPHVAVAKRLAARGVKIRPGTVISYIVLKGSGRIGDRAIPFDEFDPTKHKYDAEYYIENQVLPAVERILRAFGYRKEDLRYQKTRQVGLSAWLKPKGT

SEQ ID NO: 3149 - protein, 774 aa, synthetic construct
MILDTDMITEDGKPVIRIFKKENGEFKIEYDRTFEPYFYALLKDDSAIEEVKKITAERHGTVVTVKRVEKVQKKFLGRPVEVWKLYFTHWQDRPAIRDKIREHPAVIDIYEYDIPFAKRYLIDKGLVPMEGDEELKMLAFDIETLYHEGEEFAEGPILMISYADEEGARVITWKNVDLPYVDVVSTEREMIKRFLRVVKEKDPDVLITYNGDNFDFAYLKKRCEKLGINFALGRDGSEPKIQRMGDRFAVEVKGRIHFDLYPVIRRTINLPTYTLEAVYEAVFGQPKEKVYAEEITTAWETGENLERVARYSMEDAKVTYELGKEFLPMEAQLSRLIGQSLWDVSRSSTGNLVEWFLLRKAYERNELAPNKPDEKELARRRQSYEGGYVKEPERGLWENIVYLDFRSLYPSIIITHNVSPDTLNREGCKEYDVAPQVGHRFCKDFPGFIPSLLGDLLEERQKIKKKMKATIDPIERKLLDYRQRAIKILANSYYGYYGYARARWYCKECAESVTAWGREYITMTIKEIEEKYGFKVIYSDTDGFFATIPGADAETVKKKAMEFLKYINAKLPGALELEYEGFYKRGFFVTKKKYAVIDEEGKITTRGLEIVRRDWSEIAKETQARVLEALLKDGDVEKAVRIVKEVTEKLSKYEVPPEKLVIHEQITRDLKDYKATGPHVAVAKRLAARGVKIRPGTVISYIVLKGSGRIGDRAIPFDEFDPTKHKYDAEYYIENQVLPAVERILRAFGYRKEDLRYQKTRQVGLSAWLKPKGT

SEQ ID NO: 3150 - protein, 774 aa, synthetic construct
MILDTDMITEDGKPVIRIFKKENGEFKIEYDRTFEPYFYALLKDDSAIEEVKKITAERHGTVVTVKRVEKVQKKFLGRPVEVWKLYFTHWQDRPAIADKIREHPAVIDIYEYDIPFAKQYLIDKGLVPMEGDEELKMLAFDIETLYHEGEEFAEGPILMISYADEEGARVITWKNVDLPYVDVVSTEREMIKRFLRVVKEKDPDVLITYNGDNFDFAYLKKRCEKLGINFALGRDGSEPKIQRMGDRFAVEVKGRIHFDLYPVIRRTINLPTYTLEAVYEAVFGQPKEKVYAEEITTAWETGENLERVARYSMEDAKVTYELGKEFLPMEAQLSRLIGQSLWDVSRSSTGNLVEWFLLRKAYERNELAPNKPDEKELARRRQSYEGGYVKEPERGLWENIVYLDFRSLYPSIIITHNVSPDTLNREGCKEYDVAPQVGHRFCKDFPGFIPSLLGDLLEERQKIKKKMKATIDPIERKLLDYRQRAIKILANSYYGYYGYARARWYCKECAESVTAWGREYITMTIKEIEEKYGFKVIYSDTDGFFATIPGADAETVKKKAMEFLKYINAKLPGALELEYEGFYKRGFFVTKKKYAVIDEEGKITTRGLEIVRRDWSEIAKETQARVLEALLKDGDVEKAVRIVKEVTEKLSKYEVPPEKLVIHEQITRDLKDYKATGPHVAVAKRLAARGVKIRPGTVISYIVLKGSGRIGDRAIPFDEFDPTKHKYDAEYYIENQVLPAVERILRAFGYRKEDLRYQKTRQVGLSAWLKPKGT

SEQ ID NO: 3151 - protein, 774 aa, synthetic construct
MILDTDMITEDGKPVIRIFKKENGEFKIEYDRTFEPYFYALLKDDSAIEEVKKITAERHGTVVTVKRVEKVQKKFLGRPVEVWKLYFTHWQDRPAIFDKIREHPAVIDIYEYDIPFAKRYLIDKGLVPMEGDEELKMLAFDIETLYHEGEEFAEGPILMISYADEEGARVITWKNVDLPYVDVVSTEREMIKRFLRVVKEKDPDVLITYNGDNFDFAYLKKRCEKLGINFALGRDGSEPKIQRMGDRFAVEVKGRIHFDLYPVIRRTINLPTYTLEAVYEAVFGQPKEKVYAEEITTAWETGENLERVARYSMEDAKVTYELGKEFLPMEAQLSRLIGQSLWDVSRSSTGNLVEWFLLRKAYERNELAPNKPDEKELARRRQSYEGGYVKEPERGLWENIVYLDFRSLYPSIIITHNVSPDTLNREGCKEYDVAPQVGHRFCKDFPGFIPSLLGDLLEERQKIKKKMKATIDPIERKLLDYRQRAIKILANSYYGYYGYARARWYCKECAESVTAWGREYITMTIKEIEEKYGFKVIYSDTDGFFATIPGADAETVKKKAMEFLKYINAKLPGALELEYEGFYKRGFFVTKKKYAVIDEEGKITTRGLEIVRRDWSEIAKETQARVLEALLKDGDVEKAVRIVKEVTEKLSKYEVPPEKLVIHEQITRDLKDYKATGPHVAVAKRLAARGVKIRPGTVISYIVLKGSGRIGDRAIPFDEFDPTKHKYDAEYYIENQVLPAVERILRAFGYRKEDLRYQKTRQVGLSAWLKPKGT

SEQ ID NO: 3152 - protein, 774 aa, synthetic construct
MILDTDMITEDGKPVIRIFKKENGEFKIEYDRTFEPYFYALLKDDSAIEEVKKITAERHGTVVTVKRVEKVQKKFLGRPVEVWKLYFTHWQDRPAIHDKIREHPAVIDIYEYDIPFAKRYLIDKGLVPMEGDEELKMLAFDIETLYHEGEEFAEGPILMISYADEEGARVITWKNVDLPYVDVVSTEREMIKRFLRVVKEKDPDVLITYNGDNFDFAYLKKRCEKLGINFALGRDGSEPKIQRMGDRFAVEVKGRIHFDLYPVIRRTINLPTYTLEAVYEAVFGQPKEKVYAEEITTAWETGENLERVARYSMEDAKVTYELGKEFLPMEAQLSRLIGQSLWDVSRSSTGNLVEWFLLRKAYERNELAPNKPDEKELARRRQSYEGGYVKEPERGLWENIVYLDFRSLYPSIIITHNVSPDTLNREGCKEYDVAPQVGHRFCKDFPGFIPSLLGDLLEERQKIKKKMKATIDPIERKLLDYRQRAIKILANSYYGYYGYARARWYCKECAESVTAWGREYITMTIKEIEEKYGFKVIYSDTDGFFATIPGADAETVKKKAMEFLKYINAKLPGALELEYEGFYKRGFFVTKKKYAVIDEEGKITTRGLEIVRRDWSEIAKETQARVLEALLKDGDVEKAVRIVKEVTEKLSKYEVPPEKLVIHEQITRDLKDYKATGPHVAVAKRLAARGVKIRPGTVISYIVLKGSGRIGDRAIPFDEFDPTKHKYDAEYYIENQVLPAVERILRAFGYRKEDLRYQKTRQVGLSAWLKPKGT

SEQ ID NO: 3153 - protein, 774 aa, synthetic construct
MILDTDMITEDGKPVIRIFKKENGEFKIEYDRTFEPYFYALLKDDSAIEEVKKITAERHGTVVTVKRVEKVQKKFLGRPVEVWKLYFTHYQDVPAIRDKIREHPAVIDIYEYDIPFAKRYLIDKGLVPMEGDEELKMLAFDIETLYHEGEEFAEGPILMISYADEEGARVITWKNVDLPYVDVVSTEREMIKRFLRVVKEKDPDVLITYNGDNFDFAYLKKRCEKLGINFALGRDGSEPKIQRMGDRFAVEVKGRIHFDLYPVIRRTINLPTYTLEAVYEAVFGQPKEKVYAEEITTAWETGENLERVARYSMEDAKVTYELGKEFLPMEAQLSRLIGQSLWDVSRSSTGNLVEWFLLRKAYERNELAPNKPDEKELARRRQSYEGGYVKEPERGLWENIVYLDFRSLYPSIIITHNVSPDTLNREGCKEYDVAPQVGHRFCKDFPGFIPSLLGDLLEERQKIKKKMKATIDPIERKLLDYRQRAIKILANSYYGYYGYARARWYCKECAESVTAWGREYITMTIKEIEEKYGFKVIYSDTDGFFATIPGADAETVKKKAMEFLKYINAKLPGALELEYEGFYKRGFFVTKKKYAVIDEEGKITTRGLEIVRRDWSEIAKETQARVLEALLKDGDVEKAVRIVKEVTEKLSKYEVPPEKLVIHEQITRDLKDYKATGPHVAVAKRLAARGVKIRPGTVISYIVLKGSGRIGDRAIPFDEFDPTKHKYDAEYYIENQVLPAVERILRAFGYRKEDLRYQKTRQVGLSAWLKPKGT

SEQ ID NO: 3154 - protein, 774 aa, synthetic construct
MILDTDMITEDGKPVIRIFKKENGEFKIEYDRTFEPYFYALLKDDSAIEEVKKITAERHGTVVTVKRVEKVQKKFLGRPVEVWKLYFTHYQDVPAIFDKIREHPAVIDIYEYDIPFAKRYLIDKGLVPMEGDEELKMLAFDIETLYHEGEEFAEGPILMISYADEEGARVITWKNVDLPYVDVVSTEREMIKRFLRVVKEKDPDVLITYNGDNFDFAYLKKRCEKLGINFALGRDGSEPKIQRMGDRFAVEVKGRIHFDLYPVIRRTINLPTYTLEAVYEAVFGQPKEKVYAEEITTAWETGENLERVARYSMEDAKVTYELGKEFLPMEAQLSRLIGQSLWDVSRSSTGNLVEWFLLRKAYERNELAPNKPDEKELARRRQSYEGGYVKEPERGLWENIVYLDFRSLYPSIIITHNVSPDTLNREGCKEYDVAPQVGHRFCKDFPGFIPSLLGDLLEERQKIKKKMKATIDPIERKLLDYRQRAIKILANSYYGYYGYARARWYCKECAESVTAWGREYITMTIKEIEEKYGFKVIYSDTDGFFATIPGADAETVKKKAMEFLKYINAKLPGALELEYEGFYKRGFFVTKKKYAVIDEEGKITTRGLEIVRRDWSEIAKETQARVLEALLKDGDVEKAVRIVKEVTEKLSKYEVPPEKLVIHEQITRDLKDYKATGPHVAVAKRLAARGVKIRPGTVISYIVLKGSGRIGDRAIPFDEFDPTKHKYDAEYYIENQVLPAVERILRAFGYRKEDLRYQKTRQVGLSAWLKPKGT

SEQ ID NO: 3155 - protein, 774 aa, synthetic construct
MILDTDMITEDGKPVIRIFKKENGEFKIEYDRTFEPYFYALLKDDSAIEEVKKITAERHGTVVTVKRVEKVQKKFLGRPVEVWKLYFTHYQDVPAIHDKIREHPAVIDIYEYDIPFAKRYLIDKGLVPMEGDEELKMLAFDIETLYHEGEEFAEGPILMISYADEEGARVITWKNVDLPYVDVVSTEREMIKRFLRVVKEKDPDVLITYNGDNFDFAYLKKRCEKLGINFALGRDGSEPKIQRMGDRFAVEVKGRIHFDLYPVIRRTINLPTYTLEAVYEAVFGQPKEKVYAEEITTAWETGENLERVARYSMEDAKVTYELGKEFLPMEAQLSRLIGQSLWDVSRSSTGNLVEWFLLRKAYERNELAPNKPDEKELARRRQSYEGGYVKEPERGLWENIVYLDFRSLYPSIIITHNVSPDTLNREGCKEYDVAPQVGHRFCKDFPGFIPSLLGDLLEERQKIKKKMKATIDPIERKLLDYRQRAIKILANSYYGYYGYARARWYCKECAESVTAWGREYITMTIKEIEEKYGFKVIYSDTDGFFATIPGADAETVKKKAMEFLKYINAKLPGALELEYEGFYKRGFFVTKKKYAVIDEEGKITTRGLEIVRRDWSEIAKETQARVLEALLKDGDVEKAVRIVKEVTEKLSKYEVPPEKLVIHEQITRDLKDYKATGPHVAVAKRLAARGVKIRPGTVISYIVLKGSGRIGDRAIPFDEFDPTKHKYDAEYYIENQVLPAVERILRAFGYRKEDLRYQKTRQVGLSAWLKPKGT

SEQ ID NO: 3156 - protein, 774 aa, synthetic construct
MILDTDMITEDGKPVIRIFKKENGEFKIEYDRTFEPYFYALLKDDSAIEEVKKITAERHGTVVTVKRVEKVQKKFLGRPVEVWKLYFTHYQDIPAIRDKIREHPAVIDIYEYDIPFAKRYLIDKGLVPMEGDEELKMLAFDIETLYHEGEEFAEGPILMISYADEEGARVITWKNVDLPYVDVVSTEREMIKRFLRVVKEKDPDVLITYNGDNFDFAYLKKRCEKLGINFALGRDGSEPKIQRMGDRFAVEVKGRIHFDLYPVIRRTINLPTYTLEAVYEAVFGQPKEKVYAEEITTAWETGENLERVARYSMEDAKVTYELGKEFLPMEAQLSRLIGQSLWDVSRSSTGNLVEWFLLRKAYERNELAPNKPDEKELARRRQSYEGGYVKEPERGLWENIVYLDFRSLYPSIIITHNVSPDTLNREGCKEYDVAPQVGHRFCKDFPGFIPSLLGDLLEERQKIKKKMKATIDPIERKLLDYRQRAIKILANSYYGYYGYARARWYCKECAESVTAWGREYITMTIKEIEEKYGFKVIYSDTDGFFATIPGADAETVKKKAMEFLKYINAKLPGALELEYEGFYKRGFFVTKKKYAVIDEEGKITTRGLEIVRRDWSEIAKETQARVLEALLKDGDVEKAVRIVKEVTEKLSKYEVPPEKLVIHEQITRDLKDYKATGPHVAVAKRLAARGVKIRPGTVISYIVLKGSGRIGDRAIPFDEFDPTKHKYDAEYYIENQVLPAVERILRAFGYRKEDLRYQKTRQVGLSAWLKPKGT

SEQ ID NO: 3157 - protein, 774 aa, synthetic construct
MILDTDMITEDGKPVIRIFKKENGEFKIEYDRTFEPYFYALLKDDSAIEEVKKITAERHGTVVTVKRVEKVQKKFLGRPVEVWKLYFTHYQDIPAIFDKIREHPAVIDIYEYDIPFAKRYLIDKGLVPMEGDEELKMLAFDIETLYHEGEEFAEGPILMISYADEEGARVITWKNVDLPYVDVVSTEREMIKRFLRVVKEKDPDVLITYNGDNFDFAYLKKRCEKLGINFALGRDGSEPKIQRMGDRFAVEVKGRIHFDLYPVIRRTINLPTYTLEAVYEAVFGQPKEKVYAEEITTAWETGENLERVARYSMEDAKVTYELGKEFLPMEAQLSRLIGQSLWDVSRSSTGNLVEWFLLRKAYERNELAPNKPDEKELARRRQSYEGGYVKEPERGLWENIVYLDFRSLYPSIIITHNVSPDTLNREGCKEYDVAPQVGHRFCKDFPGFIPSLLGDLLEERQKIKKKMKATIDPIERKLLDYRQRAIKILANSYYGYYGYARARWYCKECAESVTAWGREYITMTIKEIEEKYGFKVIYSDTDGFFATIPGADAETVKKKAMEFLKYINAKLPGALELEYEGFYKRGFFVTKKKYAVIDEEGKITTRGLEIVRRDWSEIAKETQARVLEALLKDGDVEKAVRIVKEVTEKLSKYEVPPEKLVIHEQITRDLKDYKATGPHVAVAKRLAARGVKIRPGTVISYIVLKGSGRIGDRAIPFDEFDPTKHKYDAEYYIENQVLPAVERILRAFGYRKEDLRYQKTRQVGLSAWLKPKGT

SEQ ID NO: 3158 - protein, 774 aa, synthetic construct
MILDTDMITEDGKPVIRIFKKENGEFKIEYDRTFEPYFYALLKDDSAIEEVKKITAERHGTVVTVKRVEKVQKKFLGRPVEVWKLYFTHYQDQPAIADKIREHPAVIDIYEYDIPFAKRYLIDKGLVPMEGDEELKMLAFDIETLYHEGEEFAEGPILMISYADEEGARVITWKNVDLPYVDVVSTEREMIKRFLRVVKEKDPDVLITYNGDNFDFAYLKKRCEKLGINFALGRDGSEPKIQRMGDRFAVEVKGRIHFDLYPVIRRTINLPTYTLEAVYEAVFGQPKEKVYAEEITTAWETGENLERVARYSMEDAKVTYELGKEFLPMEAQLSRLIGQSLWDVSRSSTGNLVEWFLLRKAYERNELAPNKPDEKELARRRQSYEGGYVKEPERGLWENIVYLDFRSLYPSIIITHNVSPDTLNREGCKEYDVAPQVGHRFCKDFPGFIPSLLGDLLEERQKIKKKMKATIDPIERKLLDYRQRAIKILANSYYGYYGYARARWYCKECAESVTAWGREYITMTIKEIEEKYGFKVIYSDTDGFFATIPGADAETVKKKAMEFLKYINAKLPGALELEYEGFYKRGFFVTKKKYAVIDEEGKITTRGLEIVRRDWSEIAKETQARVLEALLKDGDVEKAVRIVKEVTEKLSKYEVPPEKLVIHEQITRDLKDYKATGPHVAVAKRLAARGVKIRPGTVISYIVLKGSGRIGDRAIPFDEFDPTKHKYDAEYYIENQVLPAVERILRAFGYRKEDLRYQKTRQVGLSAWLKPKGT

SEQ ID NO: 3159 - protein, 774 aa, synthetic construct
MILDTDMITEDGKPVIRIFKKENGEFKIEYDRTFEPYFYALLKDDSAIEEVKKITAERHGTVVTVKRVEKVQKKFLGRPVEVWKLYFTHYQDRPAIRDKIREHPAVIDIYEYDIPFAKRYLIDKGLVPMEGDEELKMLAFDIETLYHEGEEFAEGPILMISYADEEGARVITWKNVDLPYVDVVSTEREMIKRFLRVVKEKDPDVLITYNGDNFDFAYLKKRCEKLGINFALGRDGSEPKIQRMGDRFAVEVKGRIHFDLYPVIRRTINLPTYTLEAVYEAVFGQPKEKVYAEEITTAWETGENLERVARYSMEDAKVTYELGKEFLPMEAQLSRLIGQSLWDVSRSSTGNLVEWFLLRKAYERNELAPNKPDEKELARRRQSYEGGYVKEPERGLWENIVYLDFRSLYPSIIITHNVSPDTLNREGCKEYDVAPQVGHRFCKDFPGFIPSLLGDLLEERQKIKKKMKATIDPIERKLLDYRQRAIKILANSYYGYYGYARARWYCKECAESVTAWGREYITMTIKEIEEKYGFKVIYSDTDGFFATIPGADAETVKKKAMEFLKYINAKLPGALELEYEGFYKRGFFVTKKKYAVIDEEGKITTRGLEIVRRDWSEIAKETQARVLEALLKDGDVEKAVRIVKEVTEKLSKYEVPPEKLVIHEQITRDLKDYKATGPHVAVAKRLAARGVKIRPGTVISYIVLKGSGRIGDRAIPFDEFDPTKHKYDAEYYIENQVLPAVERILRAFGYRKEDLRYQKTRQVGLSAWLKPKGT

SEQ ID NO: 3160 - protein, 774 aa, synthetic construct
MILDTDMITEDGKPVIRIFKKENGEFKIEYDRTFEPYFYALLKDDSAIEEVKKITAERHGTVVTVKRVEKVQKKFLGRPVEVWKLYFTHPQDVPAIADKIREHPAVIDIYEYDIPFAKRYLIDKGLVPMEGDEELKMLAFDIETLYHEGEEFAEGPILMISYADEEGARVITWKNVDLPYVDVVSTEREMIKRFLRVVKEKDPDVLITYNGDNFDFAYLKKRCEKLGINFALGRDGSEPKIQRMGDRFAVEVKGRIHFDLYPVIRRTINLPTYTLEAVYEAVFGQPKEKVYAEEITTAWETGENLERVARYSMEDAKVTYELGKEFLPMEAQLSRLIGQSLWDVSRSSTGNLVEWFLLRKAYERNELAPNKPDEKELARRRQSYEGGYVKEPERGLWENIVYLDFRSLYPSIIITHNVSPDTLNREGCKEYDVAPQVGHRFCKDFPGFIPSLLGDLLEERQKIKKKMKATIDPIERKLLDYRQRAIKILANSYYGYYGYARARWYCKECAESVTAWGREYITMTIKEIEEKYGFKVIYSDTDGFFATIPGADAETVKKKAMEFLKYINAKLPGALELEYEGFYKRGFFVTKKKYAVIDEEGKITTRGLEIVRRDWSEIAKETQARVLEALLKDGDVEKAVRIVKEVTEKLSKYEVPPEKLVIHEQITRDLKDYKATGPHVAVAKRLAARGVKIRPGTVISYIVLKGSGRIGDRAIPFDEFDPTKHKYDAEYYIENQVLPAVERILRAFGYRKEDLRYQKTRQVGLSAWLKPKGT

SEQ ID NO: 3161 - protein, 774 aa, synthetic construct
MILDTDMITEDGKPVIRIFKKENGEFKIEYDRTFEPYFYALLKDDSAIEEVKKITAERHGTVVTVKRVEKVQKKFLGRPVEVWKLYFTHPQDVPAIFDKIREHPAVIDIYEYDIPFAKRYLIDKGLVPMEGDEELKMLAFDIETLYHEGEEFAEGPILMISYADEEGARVITWKNVDLPYVDVVSTEREMIKRFLRVVKEKDPDVLITYNGDNFDFAYLKKRCEKLGINFALGRDGSEPKIQRMGDRFAVEVKGRIHFDLYPVIRRTINLPTYTLEAVYEAVFGQPKEKVYAEEITTAWETGENLERVARYSMEDAKVTYELGKEFLPMEAQLSRLIGQSLWDVSRSSTGNLVEWFLLRKAYERNELAPNKPDEKELARRRQSYEGGYVKEPERGLWENIVYLDFRSLYPSIIITHNVSPDTLNREGCKEYDVAPQVGHRFCKDFPGFIPSLLGDLLEERQKIKKKMKATIDPIERKLLDYRQRAIKILANSYYGYYGYARARWYCKECAESVTAWGREYITMTIKEIEEKYGFKVIYSDTDGFFATIPGADAETVKKKAMEFLKYINAKLPGALELEYEGFYKRGFFVTKKKYAVIDEEGKITTRGLEIVRRDWSEIAKETQARVLEALLKDGDVEKAVRIVKEVTEKLSKYEVPPEKLVIHEQITRDLKDYKATGPHVAVAKRLAARGVKIRPGTVISYIVLKGSGRIGDRAIPFDEFDPTKHKYDAEYYIENQVLPAVERILRAFGYRKEDLRYQKTRQVGLSAWLKPKGT

SEQ ID NO: 3162 - protein, 774 aa, synthetic construct
MILDTDMITEDGKPVIRIFKKENGEFKIEYDRTFEPYFYALLKDDSAIEEVKKITAERHGTVVTVKRVEKVQKKFLGRPVEVWKLYFTHPQDVPAIHDKIREHPAVIDIYEYDIPFAKRYLIDKGLVPMEGDEELKMLAFDIETLYHEGEEFAEGPILMISYADEEGARVITWKNVDLPYVDVVSTEREMIKRFLRVVKEKDPDVLITYNGDNFDFAYLKKRCEKLGINFALGRDGSEPKIQRMGDRFAVEVKGRIHFDLYPVIRRTINLPTYTLEAVYEAVFGQPKEKVYAEEITTAWETGENLERVARYSMEDAKVTYELGKEFLPMEAQLSRLIGQSLWDVSRSSTGNLVEWFLLRKAYERNELAPNKPDEKELARRRQSYEGGYVKEPERGLWENIVYLDFRSLYPSIIITHNVSPDTLNREGCKEYDVAPQVGHRFCKDFPGFIPSLLGDLLEERQKIKKKMKATIDPIERKLLDYRQRAIKILANSYYGYYGYARARWYCKECAESVTAWGREYITMTIKEIEEKYGFKVIYSDTDGFFATIPGADAETVKKKAMEFLKYINAKLPGALELEYEGFYKRGFFVTKKKYAVIDEEGKITTRGLEIVRRDWSEIAKETQARVLEALLKDGDVEKAVRIVKEVTEKLSKYEVPPEKLVIHEQITRDLKDYKATGPHVAVAKRLAARGVKIRPGTVISYIVLKGSGRIGDRAIPFDEFDPTKHKYDAEYYIENQVLPAVERILRAFGYRKEDLRYQKTRQVGLSAWLKPKGT

SEQ ID NO: 3163 - protein, 774 aa, synthetic construct
MILDTDMITEDGKPVIRIFKKENGEFKIEYDRTFEPYFYALLKDDSAIEEVKKITAERHGTVVTVKRVEKVQKKFLGRPVEVWKLYFTHPQDVPAIWDKIREHPAVIDIYEYDIPFAKRYLIDKGLVPMEGDEELKMLAFDIETLYHEGEEFAEGPILMISYADEEGARVITWKNVDLPYVDVVSTEREMIKRFLRVVKEKDPDVLITYNGDNFDFAYLKKRCEKLGINFALGRDGSEPKIQRMGDRFAVEVKGRIHFDLYPVIRRTINLPTYTLEAVYEAVFGQPKEKVYAEEITTAWETGENLERVARYSMEDAKVTYELGKEFLPMEAQLSRLIGQSLWDVSRSSTGNLVEWFLLRKAYERNELAPNKPDEKELARRRQSYEGGYVKEPERGLWENIVYLDFRSLYPSIIITHNVSPDTLNREGCKEYDVAPQVGHRFCKDFPGFIPSLLGDLLEERQKIKKKMKATIDPIERKLLDYRQRAIKILANSYYGYYGYARARWYCKECAESVTAWGREYITMTIKEIEEKYGFKVIYSDTDGFFATIPGADAETVKKKAMEFLKYINAKLPGALELEYEGFYKRGFFVTKKKYAVIDEEGKITTRGLEIVRRDWSEIAKETQARVLEALLKDGDVEKAVRIVKEVTEKLSKYEVPPEKLVIHEQITRDLKDYKATGPHVAVAKRLAARGVKIRPGTVISYIVLKGSGRIGDRAIPFDEFDPTKHKYDAEYYIENQVLPAVERILRAFGYRKEDLRYQKTRQVGLSAWLKPKGT

SEQ ID NO: 3164 - protein, 774 aa, synthetic construct
MILDTDMITEDGKPVIRIFKKENGEFKIEYDRTFEPYFYALLKDDSAIEEVKKITAERHGTVVTVKRVEKVQKKFLGRPVEVWKLYFTHPQDIPAIRDKIREHPAVIDIYEYDIPFAKRYLIDKGLVPMEGDEELKMLAFDIETLYHEGEEFAEGPILMISYADEEGARVITWKNVDLPYVDVVSTEREMIKRFLRVVKEKDPDVLITYNGDNFDFAYLKKRCEKLGINFALGRDGSEPKIQRMGDRFAVEVKGRIHFDLYPVIRRTINLPTYTLEAVYEAVFGQPKEKVYAEEITTAWETGENLERVARYSMEDAKVTYELGKEFLPMEAQLSRLIGQSLWDVSRSSTGNLVEWFLLRKAYERNELAPNKPDEKELARRRQSYEGGYVKEPERGLWENIVYLDFRSLYPSIIITHNVSPDTLNREGCKEYDVAPQVGHRFCKDFPGFIPSLLGDLLEERQKIKKKMKATIDPIERKLLDYRQRAIKILANSYYGYYGYARARWYCKECAESVTAWGREYITMTIKEIEEKYGFKVIYSDTDGFFATIPGADAETVKKKAMEFLKYINAKLPGALELEYEGFYKRGFFVTKKKYAVIDEEGKITTRGLEIVRRDWSEIAKETQARVLEALLKDGDVEKAVRIVKEVTEKLSKYEVPPEKLVIHEQITRDLKDYKATGPHVAVAKRLAARGVKIRPGTVISYIVLKGSGRIGDRAIPFDEFDPTKHKYDAEYYIENQVLPAVERILRAFGYRKEDLRYQKTRQVGLSAWLKPKGT

SEQ ID NO: 3165 - protein, 774 aa, synthetic construct
MILDTDMITEDGKPVIRIFKKENGEFKIEYDRTFEPYFYALLKDDSAIEEVKKITAERHGTVVTVKRVEKVQKKFLGRPVEVWKLYFTHPQDIPAIADKIREHPAVIDIYEYDIPFAKRYLIDKGLVPMEGDEELKMLAFDIETLYHEGEEFAEGPILMISYADEEGARVITWKNVDLPYVDVVSTEREMIKRFLRVVKEKDPDVLITYNGDNFDFAYLKKRCEKLGINFALGRDGSEPKIQRMGDRFAVEVKGRIHFDLYPVIRRTINLPTYTLEAVYEAVFGQPKEKVYAEEITTAWETGENLERVARYSMEDAKVTYELGKEFLPMEAQLSRLIGQSLWDVSRSSTGNLVEWFLLRKAYERNELAPNKPDEKELARRRQSYEGGYVKEPERGLWENIVYLDFRSLYPSIIITHNVSPDTLNREGCKEYDVAPQVGHRFCKDFPGFIPSLLGDLLEERQKIKKKMKATIDPIERKLLDYRQRAIKILANSYYGYYGYARARWYCKECAESVTAWGREYITMTIKEIEEKYGFKVIYSDTDGFFATIPGADAETVKKKAMEFLKYINAKLPGALELEYEGFYKRGFFVTKKKYAVIDEEGKITTRGLEIVRRDWSEIAKETQARVLEALLKDGDVEKAVRIVKEVTEKLSKYEVPPEKLVIHEQITRDLKDYKATGPHVAVAKRLAARGVKIRPGTVISYIVLKGSGRIGDRAIPFDEFDPTKHKYDAEYYIENQVLPAVERILRAFGYRKEDLRYQKTRQVGLSAWLKPKGT

SEQ ID NO: 3166 - protein, 774 aa, synthetic construct
MILDTDMITEDGKPVIRIFKKENGEFKIEYDRTFEPYFYALLKDDSAIEEVKKITAERHGTVVTVKRVEKVQKKFLGRPVEVWKLYFTHPQDIPAIFDKIREHPAVIDIYEYDIPFAKRYLIDKGLVPMEGDEELKMLAFDIETLYHEGEEFAEGPILMISYADEEGARVITWKNVDLPYVDVVSTEREMIKRFLRVVKEKDPDVLITYNGDNFDFAYLKKRCEKLGINFALGRDGSEPKIQRMGDRFAVEVKGRIHFDLYPVIRRTINLPTYTLEAVYEAVFGQPKEKVYAEEITTAWETGENLERVARYSMEDAKVTYELGKEFLPMEAQLSRLIGQSLWDVSRSSTGNLVEWFLLRKAYERNELAPNKPDEKELARRRQSYEGGYVKEPERGLWENIVYLDFRSLYPSIIITHNVSPDTLNREGCKEYDVAPQVGHRFCKDFPGFIPSLLGDLLEERQKIKKKMKATIDPIERKLLDYRQRAIKILANSYYGYYGYARARWYCKECAESVTAWGREYITMTIKEIEEKYGFKVIYSDTDGFFATIPGADAETVKKKAMEFLKYINAKLPGALELEYEGFYKRGFFVTKKKYAVIDEEGKITTRGLEIVRRDWSEIAKETQARVLEALLKDGDVEKAVRIVKEVTEKLSKYEVPPEKLVIHEQITRDLKDYKATGPHVAVAKRLAARGVKIRPGTVISYIVLKGSGRIGDRAIPFDEFDPTKHKYDAEYYIENQVLPAVERILRAFGYRKEDLRYQKTRQVGLSAWLKPKGT

SEQ ID NO: 3167 - protein, 774 aa, synthetic construct
MILDTDMITEDGKPVIRIFKKENGEFKIEYDRTFEPYFYALLKDDSAIEEVKKITAERHGTVVTVKRVEKVQKKFLGRPVEVWKLYFTHPQDIPAIHDKIREHPAVIDIYEYDIPFAKRYLIDKGLVPMEGDEELKMLAFDIETLYHEGEEFAEGPILMISYADEEGARVITWKNVDLPYVDVVSTEREMIKRFLRVVKEKDPDVLITYNGDNFDFAYLKKRCEKLGINFALGRDGSEPKIQRMGDRFAVEVKGRIHFDLYPVIRRTINLPTYTLEAVYEAVFGQPKEKVYAEEITTAWETGENLERVARYSMEDAKVTYELGKEFLPMEAQLSRLIGQSLWDVSRSSTGNLVEWFLLRKAYERNELAPNKPDEKELARRRQSYEGGYVKEPERGLWENIVYLDFRSLYPSIIITHNVSPDTLNREGCKEYDVAPQVGHRFCKDFPGFIPSLLGDLLEERQKIKKKMKATIDPIERKLLDYRQRAIKILANSYYGYYGYARARWYCKECAESVTAWGREYITMTIKEIEEKYGFKVIYSDTDGFFATIPGADAETVKKKAMEFLKYINAKLPGALELEYEGFYKRGFFVTKKKYAVIDEEGKITTRGLEIVRRDWSEIAKETQARVLEALLKDGDVEKAVRIVKEVTEKLSKYEVPPEKLVIHEQITRDLKDYKATGPHVAVAKRLAARGVKIRPGTVISYIVLKGSGRIGDRAIPFDEFDPTKHKYDAEYYIENQVLPAVERILRAFGYRKEDLRYQKTRQVGLSAWLKPKGT

SEQ ID NO: 3168 - protein, 774 aa, synthetic construct
MILDTDMITEDGKPVIRIFKKENGEFKIEYDRTFEPYFYALLKDDSAIEEVKKITAERHGTVVTVKRVEKVQKKFLGRPVEVWKLYFTHPQDIPAIWDKIREHPAVIDIYEYDIPFAKRYLIDKGLVPMEGDEELKMLAFDIETLYHEGEEFAEGPILMISYADEEGARVITWKNVDLPYVDVVSTEREMIKRFLRVVKEKDPDVLITYNGDNFDFAYLKKRCEKLGINFALGRDGSEPKIQRMGDRFAVEVKGRIHFDLYPVIRRTINLPTYTLEAVYEAVFGQPKEKVYAEEITTAWETGENLERVARYSMEDAKVTYELGKEFLPMEAQLSRLIGQSLWDVSRSSTGNLVEWFLLRKAYERNELAPNKPDEKELARRRQSYEGGYVKEPERGLWENIVYLDFRSLYPSIIITHNVSPDTLNREGCKEYDVAPQVGHRFCKDFPGFIPSLLGDLLEERQKIKKKMKATIDPIERKLLDYRQRAIKILANSYYGYYGYARARWYCKECAESVTAWGREYITMTIKEIEEKYGFKVIYSDTDGFFATIPGADAETVKKKAMEFLKYINAKLPGALELEYEGFYKRGFFVTKKKYAVIDEEGKITTRGLEIVRRDWSEIAKETQARVLEALLKDGDVEKAVRIVKEVTEKLSKYEVPPEKLVIHEQITRDLKDYKATGPHVAVAKRLAARGVKIRPGTVISYIVLKGSGRIGDRAIPFDEFDPTKHKYDAEYYIENQVLPAVERILRAFGYRKEDLRYQKTRQVGLSAWLKPKGT

SEQ ID NO: 3169 - protein, 774 aa, synthetic construct
MILDTDMITEDGKPVIRIFKKENGEFKIEYDRTFEPYFYALLKDDSAIEEVKKITAERHGTVVTVKRVEKVQKKFLGRPVEVWKLYFTHPQDKPAIRDKIREHPAVIDIYEYDIPFAKRYLIDKGLVPMEGDEELKMLAFDIETLYHEGEEFAEGPILMISYADEEGARVITWKNVDLPYVDVVSTEREMIKRFLRVVKEKDPDVLITYNGDNFDFAYLKKRCEKLGINFALGRDGSEPKIQRMGDRFAVEVKGRIHFDLYPVIRRTINLPTYTLEAVYEAVFGQPKEKVYAEEITTAWETGENLERVARYSMEDAKVTYELGKEFLPMEAQLSRLIGQSLWDVSRSSTGNLVEWFLLRKAYERNELAPNKPDEKELARRRQSYEGGYVKEPERGLWENIVYLDFRSLYPSIIITHNVSPDTLNREGCKEYDVAPQVGHRFCKDFPGFIPSLLGDLLEERQKIKKKMKATIDPIERKLLDYRQRAIKILANSYYGYYGYARARWYCKECAESVTAWGREYITMTIKEIEEKYGFKVIYSDTDGFFATIPGADAETVKKKAMEFLKYINAKLPGALELEYEGFYKRGFFVTKKKYAVIDEEGKITTRGLEIVRRDWSEIAKETQARVLEALLKDGDVEKAVRIVKEVTEKLSKYEVPPEKLVIHEQITRDLKDYKATGPHVAVAKRLAARGVKIRPGTVISYIVLKGSGRIGDRAIPFDEFDPTKHKYDAEYYIENQVLPAVERILRAFGYRKEDLRYQKTRQVGLSAWLKPKGT

SEQ ID NO: 3170 - protein, 774 aa, synthetic construct
MILDTDMITEDGKPVIRIFKKENGEFKIEYDRTFEPYFYALLKDDSAIEEVKKITAERHGTVVTVKRVEKVQKKFLGRPVEVWKLYFTHPQDKPAIADKIREHPAVIDIYEYDIPFAKRYLIDKGLVPMEGDEELKMLAFDIETLYHEGEEFAEGPILMISYADEEGARVITWKNVDLPYVDVVSTEREMIKRFLRVVKEKDPDVLITYNGDNFDFAYLKKRCEKLGINFALGRDGSEPKIQRMGDRFAVEVKGRIHFDLYPVIRRTINLPTYTLEAVYEAVFGQPKEKVYAEEITTAWETGENLERVARYSMEDAKVTYELGKEFLPMEAQLSRLIGQSLWDVSRSSTGNLVEWFLLRKAYERNELAPNKPDEKELARRRQSYEGGYVKEPERGLWENIVYLDFRSLYPSIIITHNVSPDTLNREGCKEYDVAPQVGHRFCKDFPGFIPSLLGDLLEERQKIKKKMKATIDPIERKLLDYRQRAIKILANSYYGYYGYARARWYCKECAESVTAWGREYITMTIKEIEEKYGFKVIYSDTDGFFATIPGADAETVKKKAMEFLKYINAKLPGALELEYEGFYKRGFFVTKKKYAVIDEEGKITTRGLEIVRRDWSEIAKETQARVLEALLKDGDVEKAVRIVKEVTEKLSKYEVPPEKLVIHEQITRDLKDYKATGPHVAVAKRLAARGVKIRPGTVISYIVLKGSGRIGDRAIPFDEFDPTKHKYDAEYYIENQVLPAVERILRAFGYRKEDLRYQKTRQVGLSAWLKPKGT

SEQ ID NO: 3171 - protein, 774 aa, synthetic construct
MILDTDMITEDGKPVIRIFKKENGEFKIEYDRTFEPYFYALLKDDSAIEEVKKITAERHGTVVTVKRVEKVQKKFLGRPVEVWKLYFTHPQDKPAIFDKIREHPAVIDIYEYDIPFAKRYLIDKGLVPMEGDEELKMLAFDIETLYHEGEEFAEGPILMISYADEEGARVITWKNVDLPYVDVVSTEREMIKRFLRVVKEKDPDVLITYNGDNFDFAYLKKRCEKLGINFALGRDGSEPKIQRMGDRFAVEVKGRIHFDLYPVIRRTINLPTYTLEAVYEAVFGQPKEKVYAEEITTAWETGENLERVARYSMEDAKVTYELGKEFLPMEAQLSRLIGQSLWDVSRSSTGNLVEWFLLRKAYERNELAPNKPDEKELARRRQSYEGGYVKEPERGLWENIVYLDFRSLYPSIIITHNVSPDTLNREGCKEYDVAPQVGHRFCKDFPGFIPSLLGDLLEERQKIKKKMKATIDPIERKLLDYRQRAIKILANSYYGYYGYARARWYCKECAESVTAWGREYITMTIKEIEEKYGFKVIYSDTDGFFATIPGADAETVKKKAMEFLKYINAKLPGALELEYEGFYKRGFFVTKKKYAVIDEEGKITTRGLEIVRRDWSEIAKETQARVLEALLKDGDVEKAVRIVKEVTEKLSKYEVPPEKLVIHEQITRDLKDYKATGPHVAVAKRLAARGVKIRPGTVISYIVLKGSGRIGDRAIPFDEFDPTKHKYDAEYYIENQVLPAVERILRAFGYRKEDLRYQKTRQVGLSAWLKPKGT

SEQ ID NO: 3172 - protein, 774 aa, synthetic construct
MILDTDMITEDGKPVIRIFKKENGEFKIEYDRTFEPYFYALLKDDSAIEEVKKITAERHGTVVTVKRVEKVQKKFLGRPVEVWKLYFTHPQDKPAIHDKIREHPAVIDIYEYDIPFAKRYLIDKGLVPMEGDEELKMLAFDIETLYHEGEEFAEGPILMISYADEEGARVITWKNVDLPYVDVVSTEREMIKRFLRVVKEKDPDVLITYNGDNFDFAYLKKRCEKLGINFALGRDGSEPKIQRMGDRFAVEVKGRIHFDLYPVIRRTINLPTYTLEAVYEAVFGQPKEKVYAEEITTAWETGENLERVARYSMEDAKVTYELGKEFLPMEAQLSRLIGQSLWDVSRSSTGNLVEWFLLRKAYERNELAPNKPDEKELARRRQSYEGGYVKEPERGLWENIVYLDFRSLYPSIIITHNVSPDTLNREGCKEYDVAPQVGHRFCKDFPGFIPSLLGDLLEERQKIKKKMKATIDPIERKLLDYRQRAIKILANSYYGYYGYARARWYCKECAESVTAWGREYITMTIKEIEEKYGFKVIYSDTDGFFATIPGADAETVKKKAMEFLKYINAKLPGALELEYEGFYKRGFFVTKKKYAVIDEEGKITTRGLEIVRRDWSEIAKETQARVLEALLKDGDVEKAVRIVKEVTEKLSKYEVPPEKLVIHEQITRDLKDYKATGPHVAVAKRLAARGVKIRPGTVISYIVLKGSGRIGDRAIPFDEFDPTKHKYDAEYYIENQVLPAVERILRAFGYRKEDLRYQKTRQVGLSAWLKPKGT

SEQ ID NO: 3173 - protein, 774 aa, synthetic construct
MILDTDMITEDGKPVIRIFKKENGEFKIEYDRTFEPYFYALLKDDSAIEEVKKITAERHGTVVTVKRVEKVQKKFLGRPVEVWKLYFTHPQDKPAIWDKIREHPAVIDIYEYDIPFAKRYLIDKGLVPMEGDEELKMLAFDIETLYHEGEEFAEGPILMISYADEEGARVITWKNVDLPYVDVVSTEREMIKRFLRVVKEKDPDVLITYNGDNFDFAYLKKRCEKLGINFALGRDGSEPKIQRMGDRFAVEVKGRIHFDLYPVIRRTINLPTYTLEAVYEAVFGQPKEKVYAEEITTAWETGENLERVARYSMEDAKVTYELGKEFLPMEAQLSRLIGQSLWDVSRSSTGNLVEWFLLRKAYERNELAPNKPDEKELARRRQSYEGGYVKEPERGLWENIVYLDFRSLYPSIIITHNVSPDTLNREGCKEYDVAPQVGHRFCKDFPGFIPSLLGDLLEERQKIKKKMKATIDPIERKLLDYRQRAIKILANSYYGYYGYARARWYCKECAESVTAWGREYITMTIKEIEEKYGFKVIYSDTDGFFATIPGADAETVKKKAMEFLKYINAKLPGALELEYEGFYKRGFFVTKKKYAVIDEEGKITTRGLEIVRRDWSEIAKETQARVLEALLKDGDVEKAVRIVKEVTEKLSKYEVPPEKLVIHEQITRDLKDYKATGPHVAVAKRLAARGVKIRPGTVISYIVLKGSGRIGDRAIPFDEFDPTKHKYDAEYYIENQVLPAVERILRAFGYRKEDLRYQKTRQVGLSAWLKPKGT

SEQ ID NO: 3174 - protein, 774 aa, synthetic construct
MILDTDMITEDGKPVIRIFKKENGEFKIEYDRTFEPYFYALLKDDSAIEEVKKITAERHGTVVTVKRVEKVQKKFLGRPVEVWKLYFTHPQDQPAIRDKIREHPAVIDIYEYDIPFAKRYLIDKGLVPMEGDEELKMLAFDIETLYHEGEEFAEGPILMISYADEEGARVITWKNVDLPYVDVVSTEREMIKRFLRVVKEKDPDVLITYNGDNFDFAYLKKRCEKLGINFALGRDGSEPKIQRMGDRFAVEVKGRIHFDLYPVIRRTINLPTYTLEAVYEAVFGQPKEKVYAEEITTAWETGENLERVARYSMEDAKVTYELGKEFLPMEAQLSRLIGQSLWDVSRSSTGNLVEWFLLRKAYERNELAPNKPDEKELARRRQSYEGGYVKEPERGLWENIVYLDFRSLYPSIIITHNVSPDTLNREGCKEYDVAPQVGHRFCKDFPGFIPSLLGDLLEERQKIKKKMKATIDPIERKLLDYRQRAIKILANSYYGYYGYARARWYCKECAESVTAWGREYITMTIKEIEEKYGFKVIYSDTDGFFATIPGADAETVKKKAMEFLKYINAKLPGALELEYEGFYKRGFFVTKKKYAVIDEEGKITTRGLEIVRRDWSEIAKETQARVLEALLKDGDVEKAVRIVKEVTEKLSKYEVPPEKLVIHEQITRDLKDYKATGPHVAVAKRLAARGVKIRPGTVISYIVLKGSGRIGDRAIPFDEFDPTKHKYDAEYYIENQVLPAVERILRAFGYRKEDLRYQKTRQVGLSAWLKPKGT

SEQ ID NO: 3175 - protein, 774 aa, synthetic construct
MILDTDMITEDGKPVIRIFKKENGEFKIEYDRTFEPYFYALLKDDSAIEEVKKITAERHGTVVTVKRVEKVQKKFLGRPVEVWKLYFTHPQDQPAIHDKIREHPAVIDIYEYDIPFAKRYLIDKGLVPMEGDEELKMLAFDIETLYHEGEEFAEGPILMISYADEEGARVITWKNVDLPYVDVVSTEREMIKRFLRVVKEKDPDVLITYNGDNFDFAYLKKRCEKLGINFALGRDGSEPKIQRMGDRFAVEVKGRIHFDLYPVIRRTINLPTYTLEAVYEAVFGQPKEKVYAEEITTAWETGENLERVARYSMEDAKVTYELGKEFLPMEAQLSRLIGQSLWDVSRSSTGNLVEWFLLRKAYERNELAPNKPDEKELARRRQSYEGGYVKEPERGLWENIVYLDFRSLYPSIIITHNVSPDTLNREGCKEYDVAPQVGHRFCKDFPGFIPSLLGDLLEERQKIKKKMKATIDPIERKLLDYRQRAIKILANSYYGYYGYARARWYCKECAESVTAWGREYITMTIKEIEEKYGFKVIYSDTDGFFATIPGADAETVKKKAMEFLKYINAKLPGALELEYEGFYKRGFFVTKKKYAVIDEEGKITTRGLEIVRRDWSEIAKETQARVLEALLKDGDVEKAVRIVKEVTEKLSKYEVPPEKLVIHEQITRDLKDYKATGPHVAVAKRLAARGVKIRPGTVISYIVLKGSGRIGDRAIPFDEFDPTKHKYDAEYYIENQVLPAVERILRAFGYRKEDLRYQKTRQVGLSAWLKPKGT

SEQ ID NO: 3176 - protein, 774 aa, synthetic construct
MILDTDMITEDGKPVIRIFKKENGEFKIEYDRTFEPYFYALLKDDSAIEEVKKITAERHGTVVTVKRVEKVQKKFLGRPVEVWKLYFTHPQDRPAIRDKIREHPAVIDIYEYDIPFAKRYLIDKGLVPMEGDEELKMLAFDIETLYHEGEEFAEGPILMISYADEEGARVITWKNVDLPYVDVVSTEREMIKRFLRVVKEKDPDVLITYNGDNFDFAYLKKRCEKLGINFALGRDGSEPKIQRMGDRFAVEVKGRIHFDLYPVIRRTINLPTYTLEAVYEAVFGQPKEKVYAEEITTAWETGENLERVARYSMEDAKVTYELGKEFLPMEAQLSRLIGQSLWDVSRSSTGNLVEWFLLRKAYERNELAPNKPDEKELARRRQSYEGGYVKEPERGLWENIVYLDFRSLYPSIIITHNVSPDTLNREGCKEYDVAPQVGHRFCKDFPGFIPSLLGDLLEERQKIKKKMKATIDPIERKLLDYRQRAIKILANSYYGYYGYARARWYCKECAESVTAWGREYITMTIKEIEEKYGFKVIYSDTDGFFATIPGADAETVKKKAMEFLKYINAKLPGALELEYEGFYKRGFFVTKKKYAVIDEEGKITTRGLEIVRRDWSEIAKETQARVLEALLKDGDVEKAVRIVKEVTEKLSKYEVPPEKLVIHEQITRDLKDYKATGPHVAVAKRLAARGVKIRPGTVISYIVLKGSGRIGDRAIPFDEFDPTKHKYDAEYYIENQVLPAVERILRAFGYRKEDLRYQKTRQVGLSAWLKPKGT

SEQ ID NO: 3177 - protein, 774 aa, synthetic construct
MILDTDMITEDGKPVIRIFKKENGEFKIEYDRTFEPYFYALLKDDSAIEEVKKITAERHGTVVTVKRVEKVQKKFLGRPVEVWKLYFTHPQDRPAIADKIREHPAVIDIYEYDIPFAKRYLIDKGLVPMEGDEELKMLAFDIETLYHEGEEFAEGPILMISYADEEGARVITWKNVDLPYVDVVSTEREMIKRFLRVVKEKDPDVLITYNGDNFDFAYLKKRCEKLGINFALGRDGSEPKIQRMGDRFAVEVKGRIHFDLYPVIRRTINLPTYTLEAVYEAVFGQPKEKVYAEEITTAWETGENLERVARYSMEDAKVTYELGKEFLPMEAQLSRLIGQSLWDVSRSSTGNLVEWFLLRKAYERNELAPNKPDEKELARRRQSYEGGYVKEPERGLWENIVYLDFRSLYPSIIITHNVSPDTLNREGCKEYDVAPQVGHRFCKDFPGFIPSLLGDLLEERQKIKKKMKATIDPIERKLLDYRQRAIKILANSYYGYYGYARARWYCKECAESVTAWGREYITMTIKEIEEKYGFKVIYSDTDGFFATIPGADAETVKKKAMEFLKYINAKLPGALELEYEGFYKRGFFVTKKKYAVIDEEGKITTRGLEIVRRDWSEIAKETQARVLEALLKDGDVEKAVRIVKEVTEKLSKYEVPPEKLVIHEQITRDLKDYKATGPHVAVAKRLAARGVKIRPGTVISYIVLKGSGRIGDRAIPFDEFDPTKHKYDAEYYIENQVLPAVERILRAFGYRKEDLRYQKTRQVGLSAWLKPKGT

SEQ ID NO: 3178 - protein, 774 aa, synthetic construct
MILDTDMITEDGKPVIRIFKKENGEFKIEYDRTFEPYFYALLKDDSAIEEVKKITAERHGTVVTVKRVEKVQKKFLGRPVEVWKLYFTHPQDRPAIFDKIREHPAVIDIYEYDIPFAKRYLIDKGLVPMEGDEELKMLAFDIETLYHEGEEFAEGPILMISYADEEGARVITWKNVDLPYVDVVSTEREMIKRFLRVVKEKDPDVLITYNGDNFDFAYLKKRCEKLGINFALGRDGSEPKIQRMGDRFAVEVKGRIHFDLYPVIRRTINLPTYTLEAVYEAVFGQPKEKVYAEEITTAWETGENLERVARYSMEDAKVTYELGKEFLPMEAQLSRLIGQSLWDVSRSSTGNLVEWFLLRKAYERNELAPNKPDEKELARRRQSYEGGYVKEPERGLWENIVYLDFRSLYPSIIITHNVSPDTLNREGCKEYDVAPQVGHRFCKDFPGFIPSLLGDLLEERQKIKKKMKATIDPIERKLLDYRQRAIKILANSYYGYYGYARARWYCKECAESVTAWGREYITMTIKEIEEKYGFKVIYSDTDGFFATIPGADAETVKKKAMEFLKYINAKLPGALELEYEGFYKRGFFVTKKKYAVIDEEGKITTRGLEIVRRDWSEIAKETQARVLEALLKDGDVEKAVRIVKEVTEKLSKYEVPPEKLVIHEQITRDLKDYKATGPHVAVAKRLAARGVKIRPGTVISYIVLKGSGRIGDRAIPFDEFDPTKHKYDAEYYIENQVLPAVERILRAFGYRKEDLRYQKTRQVGLSAWLKPKGT

SEQ ID NO: 3179 - protein, 774 aa, synthetic construct
MILDTDPITEDGKPVFRIFKKENGEFKIEYDRTFEPYFYALLKDDSAIEEVKKITAERHGTVVTVKRVEKVQKKFLGRPVEVWKLYFTHFQDIPAIRDKIREHPAVIDIYEYDIPFAKRYLIDKGLVPMEGDEELKMLAFDIETLYHEGEEFAEGPILMISYADEEGARVITWKNVDLPYVDVVSTEREMIKRFLRVVKEKDPDVLITYNGDNFDFAYLKKRCEKLGINFALGRDGSEPKIQRMGDRFAVEVKGRIHFDLYPVIRRTINLPTYTLEAVYEAVFGQPKEKVYAEEITTAWETGENLERVARYSMEDAKVTYELGKEFLPMEAQLSRLIGQSLWDVSRSSTGNLVEWFLLRKAYERNELAPNKPDEKELARRRQSYEGGYVKEPERGLWENIVYLDFRSLYPSIIITHNVSPDTLNREGCKEYDVAPQVGHRFCKDFPGFIPSLLGDLLEERQKIKKKMKATIDPIERKLLDYRQRAIKILANSYYGYYGYARARWYCKECAESVTAWGREYITMTIKEIEEKYGFKVIYSDTDGFFATIPGADAETVKKKAMEFLKYINAKLPGALELEYEGFYKRGFFVTKKKYAVIDEEGKITTRGLEIVRRDWSEIAKETQARVLEALLKDGDVEKAVRIVKEVTEKLSKYEVPPEKLVIHEQITRDLKDYKATGPHVAVAKRLAARGVKIRPGTVISYIVLKGSGRIGDRAIPFDEFDPTKHKYDAEYYIENQVLPAVERILRAFGYRKEDLRYQKTRQVGLSAWLKPKGT

SEQ ID NO: 3180 - protein, 774 aa, synthetic construct
MILDTDPITEDGKPVFRIFKKENGEFKIEYDRTFEPYFYALLKDDSAIEEVKKITAERHGTVVTVKRVEKVQKKFLGRPVEVWKLYFTHYQDVPAIADKIREHPAVIDIYEYDIPFAKRYLIDKGLVPMEGDEELKMLAFDIETLYHEGEEFAEGPILMISYADEEGARVITWKNVDLPYVDVVSTEREMIKRFLRVVKEKDPDVLITYNGDNFDFAYLKKRCEKLGINFALGRDGSEPKIQRMGDRFAVEVKGRIHFDLYPVIRRTINLPTYTLEAVYEAVFGQPKEKVYAEEITTAWETGENLERVARYSMEDAKVTYELGKEFLPMEAQLSRLIGQSLWDVSRSSTGNLVEWFLLRKAYERNELAPNKPDEKELARRRQSYEGGYVKEPERGLWENIVYLDFRSLYPSIIITHNVSPDTLNREGCKEYDVAPQVGHRFCKDFPGFIPSLLGDLLEERQKIKKKMKATIDPIERKLLDYRQRAIKILANSYYGYYGYARARWYCKECAESVTAWGREYITMTIKEIEEKYGFKVIYSDTDGFFATIPGADAETVKKKAMEFLKYINAKLPGALELEYEGFYKRGFFVTKKKYAVIDEEGKITTRGLEIVRRDWSEIAKETQARVLEALLKDGDVEKAVRIVKEVTEKLSKYEVPPEKLVIHEQITRDLKDYKATGPHVAVAKRLAARGVKIRPGTVISYIVLKGSGRIGDRAIPFDEFDPTKHKYDAEYYIENQVLPAVERILRAFGYRKEDLRYQKTRQVGLSAWLKPKGT

SEQ ID NO: 3181 - protein, 774 aa, synthetic construct
MILDTDPITEDGKPVLRIFKKENGEFKIEYDRTFEAYFYALLKDDSAIEEVKKITAERHGTVVTVKRVEKVQKKFLGRPVEVWKLYFTHPQDIPAIFDKIREHPAVIDIYEYDIPFAKRYLIDKGLVPMEGDEELKMLAFDIETLYHEGEEFAEGPILMISYADEEGARVITWKNVDLPYVDVVSTEREMIKRFLRVVKEKDPDVLITYNGDNFDFAYLKKRCEKLGINFALGRDGSEPKIQRMGDRFAVEVKGRIHFDLYPVIRRTINLPTYTLEAVYEAVFGQPKEKVYAEEITTAWETGENLERVARYSMEDAKVTYELGKEFLPMEAQLSRLIGQSLWDVSRSSTGNLVEWFLLRKAYERNELAPNKPDEKELARRRQSYEGGYVKEPERGLWENIVYLDFRSLYPSIIITHNVSPDTLNREGCKEYDVAPQVGHRFCKDFPGFIPSLLGDLLEERQKIKKKMKATIDPIERKLLDYRQRAIKILANSYYGYYGYARARWYCKECAESVTAWGREYITMTIKEIEEKYGFKVIYSDTDGFFATIPGADAETVKKKAMEFLKYINAKLPGALELEYEGFYKRGFFVTKKKYAVIDEEGKITTRGLEIVRRDWSEIAKETQARVLEALLKDGDVEKAVRIVKEVTEKLSKYEVPPEKLVIHEQITRDLKDYKATGPHVAVAKRLAARGVKIRPGTVISYIVLKGSGRIGDRAIPFDEFDPTKHKYDAEYYIENQVLPAVERILRAFGYRKEDLRYQKTRQVGLSAWLKPKGT

SEQ ID NO: 3182 - protein, 774 aa, synthetic construct
MILDTDPITEDGKPVLRIFKKENGEFKIEYDRTFEPYFYALLKDDSAIEEVKKITAERHGTVVTVKRVEKVQKKFLGRPVEVWKLYFTHPQDIPAIWDKIREHPAVIDIYEYDIPFAKRYLIDKGLVPMEGDEELKMLAFDIETLYHEGEEFAEGPILMISYADEEGARVITWKNVDLPYVDVVSTEREMIKRFLRVVKEKDPDVLITYNGDNFDFAYLKKRCEKLGINFALGRDGSEPKIQRMGDRFAVEVKGRIHFDLYPVIRRTINLPTYTLEAVYEAVFGQPKEKVYAEEITTAWETGENLERVARYSMEDAKVTYELGKEFLPMEAQLSRLIGQSLWDVSRSSTGNLVEWFLLRKAYERNELAPNKPDEKELARRRQSYEGGYVKEPERGLWENIVYLDFRSLYPSIIITHNVSPDTLNREGCKEYDVAPQVGHRFCKDFPGFIPSLLGDLLEERQKIKKKMKATIDPIERKLLDYRQRAIKILANSYYGYYGYARARWYCKECAESVTAWGREYITMTIKEIEEKYGFKVIYSDTDGFFATIPGADAETVKKKAMEFLKYINAKLPGALELEYEGFYKRGFFVTKKKYAVIDEEGKITTRGLEIVRRDWSEIAKETQARVLEALLKDGDVEKAVRIVKEVTEKLSKYEVPPEKLVIHEQITRDLKDYKATGPHVAVAKRLAARGVKIRPGTVISYIVLKGSGRIGDRAIPFDEFDPTKHKYDAEYYIENQVLPAVERILRAFGYRKEDLRYQKTRQVGLSAWLKPKGT

SEQ ID NO: 3183 - protein, 774 aa, synthetic construct
MILDTDPITEDGKPVMRIFKKENGEFKIEYDRTFEPYFYALLKDDSAIEEVKKITAERHGTVVTVKRVEKVQKKFLGRPVEVWKLYFTHWQDIPAIRDKIREHPAVIDIYEYDIPFAKRYLIDKGLVPMEGDEELKMLAFDIETLYHEGEEFAEGPILMISYADEEGARVITWKNVDLPYVDVVSTEREMIKRFLRVVKEKDPDVLITYNGDNFDFAYLKKRCEKLGINFALGRDGSEPKIQRMGDRFAVEVKGRIHFDLYPVIRRTINLPTYTLEAVYEAVFGQPKEKVYAEEITTAWETGENLERVARYSMEDAKVTYELGKEFLPMEAQLSRLIGQSLWDVSRSSTGNLVEWFLLRKAYERNELAPNKPDEKELARRRQSYEGGYVKEPERGLWENIVYLDFRSLYPSIIITHNVSPDTLNREGCKEYDVAPQVGHRFCKDFPGFIPSLLGDLLEERQKIKKKMKATIDPIERKLLDYRQRAIKILANSYYGYYGYARARWYCKECAESVTAWGREYITMTIKEIEEKYGFKVIYSDTDGFFATIPGADAETVKKKAMEFLKYINAKLPGALELEYEGFYKRGFFVTKKKYAVIDEEGKITTRGLEIVRRDWSEIAKETQARVLEALLKDGDVEKAVRIVKEVTEKLSKYEVPPEKLVIHEQITRDLKDYKATGPHVAVAKRLAARGVKIRPGTVISYIVLKGSGRIGDRAIPFDEFDPTKHKYDAEYYIENQVLPAVERILRAFGYRKEDLRYQKTRQVGLSAWLKPKGT

SEQ ID NO: 3184 - protein, 774 aa, synthetic construct
MILDTDPITEDGKPVMRIFKKENGEFKIEYDRTFEPYFYALLKDDSAIEEVKKITAERHGTVVTVKRVEKVQKKFLGRPVEVWKLYFTHWQDIPAIADKIREHPAVIDIYEYDIPFAKRYLIDKGLVPMEGDEELKMLAFDIETLYHEGEEFAEGPILMISYADEEGARVITWKNVDLPYVDVVSTEREMIKRFLRVVKEKDPDVLITYNGDNFDFAYLKKRCEKLGINFALGRDGSEPKIQRMGDRFAVEVKGRIHFDLYPVIRRTINLPTYTLEAVYEAVFGQPKEKVYAEEITTAWETGENLERVARYSMEDAKVTYELGKEFLPMEAQLSRLIGQSLWDVSRSSTGNLVEWFLLRKAYERNELAPNKPDEKELARRRQSYEGGYVKEPERGLWENIVYLDFRSLYPSIIITHNVSPDTLNREGCKEYDVAPQVGHRFCKDFPGFIPSLLGDLLEERQKIKKKMKATIDPIERKLLDYRQRAIKILANSYYGYYGYARARWYCKECAESVTAWGREYITMTIKEIEEKYGFKVIYSDTDGFFATIPGADAETVKKKAMEFLKYINAKLPGALELEYEGFYKRGFFVTKKKYAVIDEEGKITTRGLEIVRRDWSEIAKETQARVLEALLKDGDVEKAVRIVKEVTEKLSKYEVPPEKLVIHEQITRDLKDYKATGPHVAVAKRLAARGVKIRPGTVISYIVLKGSGRIGDRAIPFDEFDPTKHKYDAEYYIENQVLPAVERILRAFGYRKEDLRYQKTRQVGLSAWLKPKGT

SEQ ID NO: 3185 - protein, 774 aa, synthetic construct
MILDTDPITEDGKPVMRIFKKENGEFKIEYDRTFEPYFYALLKDDSAIEEVKKITAERHGTVVTVKRVEKVQKKFLGRPVEVWKLYFTHYQDIPAIRDKIREHPAVIDIYEYDIPFAKRYLIDKGLVPMEGDEELKMLAFDIETLYHEGEEFAEGPILMISYADEEGARVITWKNVDLPYVDVVSTEREMIKRFLRVVKEKDPDVLITYNGDNFDFAYLKKRCEKLGINFALGRDGSEPKIQRMGDRFAVEVKGRIHFDLYPVIRRTINLPTYTLEAVYEAVFGQPKEKVYAEEITTAWETGENLERVARYSMEDAKVTYELGKEFLPMEAQLSRLIGQSLWDVSRSSTGNLVEWFLLRKAYERNELAPNKPDEKELARRRQSYEGGYVKEPERGLWENIVYLDFRSLYPSIIITHNVSPDTLNREGCKEYDVAPQVGHRFCKDFPGFIPSLLGDLLEERQKIKKKMKATIDPIERKLLDYRQRAIKILANSYYGYYGYARARWYCKECAESVTAWGREYITMTIKEIEEKYGFKVIYSDTDGFFATIPGADAETVKKKAMEFLKYINAKLPGALELEYEGFYKRGFFVTKKKYAVIDEEGKITTRGLEIVRRDWSEIAKETQARVLEALLKDGDVEKAVRIVKEVTEKLSKYEVPPEKLVIHEQITRDLKDYKATGPHVAVAKRLAARGVKIRPGTVISYIVLKGSGRIGDRAIPFDEFDPTKHKYDAEYYIENQVLPAVERILRAFGYRKEDLRYQKTRQVGLSAWLKPKGT

SEQ ID NO: 3186 - protein, 774 aa, synthetic construct
MILDTDPITEDGKPVMRIFKKENGEFKIEYDRTFEPYFYALLKDDSAIEEVKKITAERHGTVVTVKRVEKVQKKFLGRPVEVWKLYFTHPQDQPAIRDKIREHPAVIDIYEYDIPFAKRYLIDKGLVPMEGDEELKMLAFDIETLYHEGEEFAEGPILMISYADEEGARVITWKNVDLPYVDVVSTEREMIKRFLRVVKEKDPDVLITYNGDNFDFAYLKKRCEKLGINFALGRDGSEPKIQRMGDRFAVEVKGRIHFDLYPVIRRTINLPTYTLEAVYEAVFGQPKEKVYAEEITTAWETGENLERVARYSMEDAKVTYELGKEFLPMEAQLSRLIGQSLWDVSRSSTGNLVEWFLLRKAYERNELAPNKPDEKELARRRQSYEGGYVKEPERGLWENIVYLDFRSLYPSIIITHNVSPDTLNREGCKEYDVAPQVGHRFCKDFPGFIPSLLGDLLEERQKIKKKMKATIDPIERKLLDYRQRAIKILANSYYGYYGYARARWYCKECAESVTAWGREYITMTIKEIEEKYGFKVIYSDTDGFFATIPGADAETVKKKAMEFLKYINAKLPGALELEYEGFYKRGFFVTKKKYAVIDEEGKITTRGLEIVRRDWSEIAKETQARVLEALLKDGDVEKAVRIVKEVTEKLSKYEVPPEKLVIHEQITRDLKDYKATGPHVAVAKRLAARGVKIRPGTVISYIVLKGSGRIGDRAIPFDEFDPTKHKYDAEYYIENQVLPAVERILRAFGYRKEDLRYQKTRQVGLSAWLKPKGT

SEQ ID NO: 3187 - protein, 774 aa, synthetic construct
MILDTDPITEDGKPVIRIFKKENGEFKIEYDRTFEAYFYALLKDDSAIEEVKKITAERHGTVVTVKRVEKVQKKFLGRPVEVWKLYFTHWQDIPAIRDKIREHPAVIDIYEYDIPFAKRYLIDKGLVPMEGDEELKMLAFDIETLYHEGEEFAEGPILMISYADEEGARVITWKNVDLPYVDVVSTEREMIKRFLRVVKEKDPDVLITYNGDNFDFAYLKKRCEKLGINFALGRDGSEPKIQRMGDRFAVEVKGRIHFDLYPVIRRTINLPTYTLEAVYEAVFGQPKEKVYAEEITTAWETGENLERVARYSMEDAKVTYELGKEFLPMEAQLSRLIGQSLWDVSRSSTGNLVEWFLLRKAYERNELAPNKPDEKELARRRQSYEGGYVKEPERGLWENIVYLDFRSLYPSIIITHNVSPDTLNREGCKEYDVAPQVGHRFCKDFPGFIPSLLGDLLEERQKIKKKMKATIDPIERKLLDYRQRAIKILANSYYGYYGYARARWYCKECAESVTAWGREYITMTIKEIEEKYGFKVIYSDTDGFFATIPGADAETVKKKAMEFLKYINAKLPGALELEYEGFYKRGFFVTKKKYAVIDEEGKITTRGLEIVRRDWSEIAKETQARVLEALLKDGDVEKAVRIVKEVTEKLSKYEVPPEKLVIHEQITRDLKDYKATGPHVAVAKRLAARGVKIRPGTVISYIVLKGSGRIGDRAIPFDEFDPTKHKYDAEYYIENQVLPAVERILRAFGYRKEDLRYQKTRQVGLSAWLKPKGT

SEQ ID NO: 3188 - protein, 774 aa, synthetic construct
MILDTDPITEDGKPVIRIFKKENGEFKIEYDRTFEPYFYALLKDDSAIEEVKKITAERHGTVVTVKRVEKVQKKFLGRPVEVWKLYFTHFQDVPAIRDKIREHPAVIDIYEYDIPFAKRYLIDKGLVPMEGDEELKMLAFDIETLYHEGEEFAEGPILMISYADEEGARVITWKNVDLPYVDVVSTEREMIKRFLRVVKEKDPDVLITYNGDNFDFAYLKKRCEKLGINFALGRDGSEPKIQRMGDRFAVEVKGRIHFDLYPVIRRTINLPTYTLEAVYEAVFGQPKEKVYAEEITTAWETGENLERVARYSMEDAKVTYELGKEFLPMEAQLSRLIGQSLWDVSRSSTGNLVEWFLLRKAYERNELAPNKPDEKELARRRQSYEGGYVKEPERGLWENIVYLDFRSLYPSIIITHNVSPDTLNREGCKEYDVAPQVGHRFCKDFPGFIPSLLGDLLEERQKIKKKMKATIDPIERKLLDYRQRAIKILANSYYGYYGYARARWYCKECAESVTAWGREYITMTIKEIEEKYGFKVIYSDTDGFFATIPGADAETVKKKAMEFLKYINAKLPGALELEYEGFYKRGFFVTKKKYAVIDEEGKITTRGLEIVRRDWSEIAKETQARVLEALLKDGDVEKAVRIVKEVTEKLSKYEVPPEKLVIHEQITRDLKDYKATGPHVAVAKRLAARGVKIRPGTVISYIVLKGSGRIGDRAIPFDEFDPTKHKYDAEYYIENQVLPAVERILRAFGYRKEDLRYQKTRQVGLSAWLKPKGT

SEQ ID NO: 3189 - protein, 774 aa, synthetic construct
MILDTDPITEDGKPVIRIFKKENGEFKIEYDRTFEPYFYALLKDDSAIEEVKKITAERHGTVVTVKRVEKVQKKFLGRPVEVWKLYFTHWQDIPAIRDKIREHPAVIDIYEYDIPFAKRYLIDKGLVPMEGDEELKMLAFDIETLYHEGEEFAEGPILMISYADEEGARVITWKNVDLPYVDVVSTEREMIKRFLRVVKEKDPDVLITYNGDNFDFAYLKKRCEKLGINFALGRDGSEPKIQRMGDRFAVEVKGRIHFDLYPVIRRTINLPTYTLEAVYEAVFGQPKEKVYAEEITTAWETGENLERVARYSMEDAKVTYELGKEFLPMEAQLSRLIGQSLWDVSRSSTGNLVEWFLLRKAYERNELAPNKPDEKELARRRQSYEGGYVKEPERGLWENIVYLDFRSLYPSIIITHNVSPDTLNREGCKEYDVAPQVGHRFCKDFPGFIPSLLGDLLEERQKIKKKMKATIDPIERKLLDYRQRAIKILANSYYGYYGYARARWYCKECAESVTAWGREYITMTIKEIEEKYGFKVIYSDTDGFFATIPGADAETVKKKAMEFLKYINAKLPGALELEYEGFYKRGFFVTKKKYAVIDEEGKITTRGLEIVRRDWSEIAKETQARVLEALLKDGDVEKAVRIVKEVTEKLSKYEVPPEKLVIHEQITRDLKDYKATGPHVAVAKRLAARGVKIRPGTVISYIVLKGSGRIGDRAIPFDEFDPTKHKYDAEYYIENQVLPAVERILRAFGYRKEDLRYQKTRQVGLSAWLKPKGT

SEQ ID NO: 3190 - protein, 774 aa, synthetic construct
MILDTDPITEDGKPVIRIFKKENGEFKIEYDRTFEPYFYALLKDDSAIEEVKKITAERHGTVVTVKRVEKVQKKFLGRPVEVWKLYFTHWQDIPAIADKIREHPAVIDIYEYDIPFAKRYLIDKGLVPMEGDEELKMLAFDIETLYHEGEEFAEGPILMISYADEEGARVITWKNVDLPYVDVVSTEREMIKRFLRVVKEKDPDVLITYNGDNFDFAYLKKRCEKLGINFALGRDGSEPKIQRMGDRFAVEVKGRIHFDLYPVIRRTINLPTYTLEAVYEAVFGQPKEKVYAEEITTAWETGENLERVARYSMEDAKVTYELGKEFLPMEAQLSRLIGQSLWDVSRSSTGNLVEWFLLRKAYERNELAPNKPDEKELARRRQSYEGGYVKEPERGLWENIVYLDFRSLYPSIIITHNVSPDTLNREGCKEYDVAPQVGHRFCKDFPGFIPSLLGDLLEERQKIKKKMKATIDPIERKLLDYRQRAIKILANSYYGYYGYARARWYCKECAESVTAWGREYITMTIKEIEEKYGFKVIYSDTDGFFATIPGADAETVKKKAMEFLKYINAKLPGALELEYEGFYKRGFFVTKKKYAVIDEEGKITTRGLEIVRRDWSEIAKETQARVLEALLKDGDVEKAVRIVKEVTEKLSKYEVPPEKLVIHEQITRDLKDYKATGPHVAVAKRLAARGVKIRPGTVISYIVLKGSGRIGDRAIPFDEFDPTKHKYDAEYYIENQVLPAVERILRAFGYRKEDLRYQKTRQVGLSAWLKPKGT

SEQ ID NO: 3191 - protein, 774 aa, synthetic construct
MILDTDPITEDGKPVIRIFKKENGEFKIEYDRTFEPYFYALLKDDSAIEEVKKITAERHGTVVTVKRVEKVQKKFLGRPVEVWKLYFTHWQDQPAIRDKIREHPAVIDIYEYDIPFAKRYLIDKGLVPMEGDEELKMLAFDIETLYHEGEEFAEGPILMISYADEEGARVITWKNVDLPYVDVVSTEREMIKRFLRVVKEKDPDVLITYNGDNFDFAYLKKRCEKLGINFALGRDGSEPKIQRMGDRFAVEVKGRIHFDLYPVIRRTINLPTYTLEAVYEAVFGQPKEKVYAEEITTAWETGENLERVARYSMEDAKVTYELGKEFLPMEAQLSRLIGQSLWDVSRSSTGNLVEWFLLRKAYERNELAPNKPDEKELARRRQSYEGGYVKEPERGLWENIVYLDFRSLYPSIIITHNVSPDTLNREGCKEYDVAPQVGHRFCKDFPGFIPSLLGDLLEERQKIKKKMKATIDPIERKLLDYRQRAIKILANSYYGYYGYARARWYCKECAESVTAWGREYITMTIKEIEEKYGFKVIYSDTDGFFATIPGADAETVKKKAMEFLKYINAKLPGALELEYEGFYKRGFFVTKKKYAVIDEEGKITTRGLEIVRRDWSEIAKETQARVLEALLKDGDVEKAVRIVKEVTEKLSKYEVPPEKLVIHEQITRDLKDYKATGPHVAVAKRLAARGVKIRPGTVISYIVLKGSGRIGDRAIPFDEFDPTKHKYDAEYYIENQVLPAVERILRAFGYRKEDLRYQKTRQVGLSAWLKPKGT

SEQ ID NO: 3192 - protein, 774 aa, synthetic construct
MILDTDPITEDGKPVIRIFKKENGEFKIEYDRTFEPYFYALLKDDSAIEEVKKITAERHGTVVTVKRVEKVQKKFLGRPVEVWKLYFTHYQDIPAIRDKIREHPAVIDIYEYDIPFAKRYLIDKGLVPMEGDEELKMLAFDIETLYHEGEEFAEGPILMISYADEEGARVITWKNVDLPYVDVVSTEREMIKRFLRVVKEKDPDVLITYNGDNFDFAYLKKRCEKLGINFALGRDGSEPKIQRMGDRFAVEVKGRIHFDLYPVIRRTINLPTYTLEAVYEAVFGQPKEKVYAEEITTAWETGENLERVARYSMEDAKVTYELGKEFLPMEAQLSRLIGQSLWDVSRSSTGNLVEWFLLRKAYERNELAPNKPDEKELARRRQSYEGGYVKEPERGLWENIVYLDFRSLYPSIIITHNVSPDTLNREGCKEYDVAPQVGHRFCKDFPGFIPSLLGDLLEERQKIKKKMKATIDPIERKLLDYRQRAIKILANSYYGYYGYARARWYCKECAESVTAWGREYITMTIKEIEEKYGFKVIYSDTDGFFATIPGADAETVKKKAMEFLKYINAKLPGALELEYEGFYKRGFFVTKKKYAVIDEEGKITTRGLEIVRRDWSEIAKETQARVLEALLKDGDVEKAVRIVKEVTEKLSKYEVPPEKLVIHEQITRDLKDYKATGPHVAVAKRLAARGVKIRPGTVISYIVLKGSGRIGDRAIPFDEFDPTKHKYDAEYYIENQVLPAVERILRAFGYRKEDLRYQKTRQVGLSAWLKPKGT

SEQ ID NO: 3193 - protein, 774 aa, synthetic construct
MILDTDYITEDGKPVIRIFKKENGEFKIEYDRTFEPYFYALLKDDSAIEEVKKITAERHGTVVTVKRVEKVQKKFLGRPVEVWKLYFTHPQDVPAIRDKIREHPAVIDIYEYDIPFMKRYLIIKGLVPMEGDEELKMLAFDIETLYHEGEEFAEGPILMISYADEEGARVITWKNVDLPYVDVVSTEREMIKRFLRVVKEKDPDVLITYNGDNFDFAYLKKRCEKLGINFALGRDGSEPKIQRMGDRFAVEVKGRIHFDLYPVIRRTINLPTYTLEAVYEAVFGQPKEKVYAEEITTAWETGENLERVARYSMEDAKVTYELGKEFLPMEAQLSRLIGQSLWDVSRSSTGNLVEWFLLRKAYERNELAPNKPDEKELARRRQSYEGGYVKEPERGLWENIVYLDFRSLYPSIIITHNVSPDTLNREGCKEYDVAPQVGHRFCKDFPGFIPSLLGDLLEERQKIKKKMKATIDPIERKLLDYRQRAIKILANSYYGYYGYARARWYCKECAESVTAWGREYITMTIKEIEEKYGFKVIYSDTDGFFATIPGADAETVKKKAMEFLKYINAKLPGALELEYEGFYKRGFFVTKKKYAVIDEEGKITTRGLEIVRRDWSEIAKETQARVLEALLKDGDVEKAVRIVKEVTEKLSKYEVPPEKLVIHEQITRDLKDYKATGPHVAVAKRLAARGVKIRPGTVISYIVLKGSGRIGDRAIPFDEFDPTKHKYDAEYYIENQVLPAVERILRAFGYRKEDLRYQKTRQVGLSAWLKPKGT

SEQ ID NO: 3194 - protein, 774 aa, synthetic construct
MILDTDYITEDGKPVIRIFKKENGEFKIEYDRTFEPYFYALLKDDSAIEEVKKITAERHGTVVTVKRVEKVQKKFLGRPVEVWKLYFTHPQDVPAIRDKIREHPAVIDIYEYDIPFMKQYLIDKGLVPMEGDEELKMLAFDIETLYHEGEEFAEGPILMISYADEEGARVITWKNVDLPYVDVVSTEREMIKRFLRVVKEKDPDVLITYNGDNFDFAYLKKRCEKLGINFALGRDGSEPKIQRMGDRFAVEVKGRIHFDLYPVIRRTINLPTYTLEAVYEAVFGQPKEKVYAEEITTAWETGENLERVARYSMEDAKVTYELGKEFLPMEAQLSRLIGQSLWDVSRSSTGNLVEWFLLRKAYERNELAPNKPDEKELARRRQSYEGGYVKEPERGLWENIVYLDFRSLYPSIIITHNVSPDTLNREGCKEYDVAPQVGHRFCKDFPGFIPSLLGDLLEERQKIKKKMKATIDPIERKLLDYRQRAIKILANSYYGYYGYARARWYCKECAESVTAWGREYITMTIKEIEEKYGFKVIYSDTDGFFATIPGADAETVKKKAMEFLKYINAKLPGALELEYEGFYKRGFFVTKKKYAVIDEEGKITTRGLEIVRRDWSEIAKETQARVLEALLKDGDVEKAVRIVKEVTEKLSKYEVPPEKLVIHEQITRDLKDYKATGPHVAVAKRLAARGVKIRPGTVISYIVLKGSGRIGDRAIPFDEFDPTKHKYDAEYYIENQVLPAVERILRAFGYRKEDLRYQKTRQVGLSAWLKPKGT

SEQ ID NO: 3195 - protein, 774 aa, synthetic construct
MILDTDYITEDGKPVIRIFKKENGEFKIEYDRTFEPYFYALLKDDSAIEEVKKITAERHGTVVTVKRVEKVQKKFLGRPVEVWKLYFTHPQDVPAIRDKIREHPAVIDIYEYDIPFMKQYLIIKGLVPMEGDEELKMLAFDIETLYHEGEEFAEGPILMISYADEEGARVITWKNVDLPYVDVVSTEREMIKRFLRVVKEKDPDVLITYNGDNFDFAYLKKRCEKLGINFALGRDGSEPKIQRMGDRFAVEVKGRIHFDLYPVIRRTINLPTYTLEAVYEAVFGQPKEKVYAEEITTAWETGENLERVARYSMEDAKVTYELGKEFLPMEAQLSRLIGQSLWDVSRSSTGNLVEWFLLRKAYERNELAPNKPDEKELARRRQSYEGGYVKEPERGLWENIVYLDFRSLYPSIIITHNVSPDTLNREGCKEYDVAPQVGHRFCKDFPGFIPSLLGDLLEERQKIKKKMKATIDPIERKLLDYRQRAIKILANSYYGYYGYARARWYCKECAESVTAWGREYITMTIKEIEEKYGFKVIYSDTDGFFATIPGADAETVKKKAMEFLKYINAKLPGALELEYEGFYKRGFFVTKKKYAVIDEEGKITTRGLEIVRRDWSEIAKETQARVLEALLKDGDVEKAVRIVKEVTEKLSKYEVPPEKLVIHEQITRDLKDYKATGPHVAVAKRLAARGVKIRPGTVISYIVLKGSGRIGDRAIPFDEFDPTKHKYDAEYYIENQVLPAVERILRAFGYRKEDLRYQKTRQVGLSAWLKPKGT

SEQ ID NO: 3196 - protein, 774 aa, synthetic construct
MILDTDYITEDGKPVIRIFKKENGEFKIEYDRTFEPYFYALLKDDSAIEEVKKITAERHGTVVTVKRVEKVQKKFLGRPVEVWKLYFTHPQDVPAIRDKIREHPAVIDIYEYDIPPMKRYLIDKGLVPMEGDEELKMLAFDIETLYHEGEEFAEGPILMISYADEEGARVITWKNVDLPYVDVVSTEREMIKRFLRVVKEKDPDVLITYNGDNFDFAYLKKRCEKLGINFALGRDGSEPKIQRMGDRFAVEVKGRIHFDLYPVIRRTINLPTYTLEAVYEAVFGQPKEKVYAEEITTAWETGENLERVARYSMEDAKVTYELGKEFLPMEAQLSRLIGQSLWDVSRSSTGNLVEWFLLRKAYERNELAPNKPDEKELARRRQSYEGGYVKEPERGLWENIVYLDFRSLYPSIIITHNVSPDTLNREGCKEYDVAPQVGHRFCKDFPGFIPSLLGDLLEERQKIKKKMKATIDPIERKLLDYRQRAIKILANSYYGYYGYARARWYCKECAESVTAWGREYITMTIKEIEEKYGFKVIYSDTDGFFATIPGADAETVKKKAMEFLKYINAKLPGALELEYEGFYKRGFFVTKKKYAVIDEEGKITTRGLEIVRRDWSEIAKETQARVLEALLKDGDVEKAVRIVKEVTEKLSKYEVPPEKLVIHEQITRDLKDYKATGPHVAVAKRLAARGVKIRPGTVISYIVLKGSGRIGDRAIPFDEFDPTKHKYDAEYYIENQVLPAVERILRAFGYRKEDLRYQKTRQVGLSAWLKPKGT

SEQ ID NO: 3197 - protein, 774 aa, synthetic construct
MILDTDYITEDGKPVIRIFKKENGEFKIEYDRTFEPYFYALLKDDSAIEEVKKITAERHGTVVTVKRVEKVQKKFLGRPVEVWKLYFTHPQDVPAIRDKIREHPAVIDIYEYDIPPMKRYLIIKGLVPMEGDEELKMLAFDIETLYHEGEEFAEGPILMISYADEEGARVITWKNVDLPYVDVVSTEREMIKRFLRVVKEKDPDVLITYNGDNFDFAYLKKRCEKLGINFALGRDGSEPKIQRMGDRFAVEVKGRIHFDLYPVIRRTINLPTYTLEAVYEAVFGQPKEKVYAEEITTAWETGENLERVARYSMEDAKVTYELGKEFLPMEAQLSRLIGQSLWDVSRSSTGNLVEWFLLRKAYERNELAPNKPDEKELARRRQSYEGGYVKEPERGLWENIVYLDFRSLYPSIIITHNVSPDTLNREGCKEYDVAPQVGHRFCKDFPGFIPSLLGDLLEERQKIKKKMKATIDPIERKLLDYRQRAIKILANSYYGYYGYARARWYCKECAESVTAWGREYITMTIKEIEEKYGFKVIYSDTDGFFATIPGADAETVKKKAMEFLKYINAKLPGALELEYEGFYKRGFFVTKKKYAVIDEEGKITTRGLEIVRRDWSEIAKETQARVLEALLKDGDVEKAVRIVKEVTEKLSKYEVPPEKLVIHEQITRDLKDYKATGPHVAVAKRLAARGVKIRPGTVISYIVLKGSGRIGDRAIPFDEFDPTKHKYDAEYYIENQVLPAVERILRAFGYRKEDLRYQKTRQVGLSAWLKPKGT

SEQ ID NO: 3198 - protein, 774 aa, synthetic construct
MILDTDYITEDGKPVIRIFKKENGEFKIEYDRTFEPYFYALLKDDSAIEEVKKITAERHGTVVTVKRVEKVQKKFLGRPVEVWKLYFTHPQDVPAIRDKIREHPAVIDIYEYDIPPMKQYLIDKGLVPMEGDEELKMLAFDIETLYHEGEEFAEGPILMISYADEEGARVITWKNVDLPYVDVVSTEREMIKRFLRVVKEKDPDVLITYNGDNFDFAYLKKRCEKLGINFALGRDGSEPKIQRMGDRFAVEVKGRIHFDLYPVIRRTINLPTYTLEAVYEAVFGQPKEKVYAEEITTAWETGENLERVARYSMEDAKVTYELGKEFLPMEAQLSRLIGQSLWDVSRSSTGNLVEWFLLRKAYERNELAPNKPDEKELARRRQSYEGGYVKEPERGLWENIVYLDFRSLYPSIIITHNVSPDTLNREGCKEYDVAPQVGHRFCKDFPGFIPSLLGDLLEERQKIKKKMKATIDPIERKLLDYRQRAIKILANSYYGYYGYARARWYCKECAESVTAWGREYITMTIKEIEEKYGFKVIYSDTDGFFATIPGADAETVKKKAMEFLKYINAKLPGALELEYEGFYKRGFFVTKKKYAVIDEEGKITTRGLEIVRRDWSEIAKETQARVLEALLKDGDVEKAVRIVKEVTEKLSKYEVPPEKLVIHEQITRDLKDYKATGPHVAVAKRLAARGVKIRPGTVISYIVLKGSGRIGDRAIPFDEFDPTKHKYDAEYYIENQVLPAVERILRAFGYRKEDLRYQKTRQVGLSAWLKPKGT

SEQ ID NO: 3199 - protein, 774 aa, synthetic construct
MILDTDYITEDGKPVIRIFKKENGEFKIEYDRTFEPYFYALLKDDSAIEEVKKITAERHGTVVTVKRVEKVQKKFLGRPVEVWKLYFTHPQDVPAIRDKIREHPAVIDIYEYDIPPMKQYLIIKGLVPMEGDEELKMLAFDIETLYHEGEEFAEGPILMISYADEEGARVITWKNVDLPYVDVVSTEREMIKRFLRVVKEKDPDVLITYNGDNFDFAYLKKRCEKLGINFALGRDGSEPKIQRMGDRFAVEVKGRIHFDLYPVIRRTINLPTYTLEAVYEAVFGQPKEKVYAEEITTAWETGENLERVARYSMEDAKVTYELGKEFLPMEAQLSRLIGQSLWDVSRSSTGNLVEWFLLRKAYERNELAPNKPDEKELARRRQSYEGGYVKEPERGLWENIVYLDFRSLYPSIIITHNVSPDTLNREGCKEYDVAPQVGHRFCKDFPGFIPSLLGDLLEERQKIKKKMKATIDPIERKLLDYRQRAIKILANSYYGYYGYARARWYCKECAESVTAWGREYITMTIKEIEEKYGFKVIYSDTDGFFATIPGADAETVKKKAMEFLKYINAKLPGALELEYEGFYKRGFFVTKKKYAVIDEEGKITTRGLEIVRRDWSEIAKETQARVLEALLKDGDVEKAVRIVKEVTEKLSKYEVPPEKLVIHEQITRDLKDYKATGPHVAVAKRLAARGVKIRPGTVISYIVLKGSGRIGDRAIPFDEFDPTKHKYDAEYYIENQVLPAVERILRAFGYRKEDLRYQKTRQVGLSAWLKPKGT

SEQ ID NO: 3200 - protein, 774 aa, synthetic construct
MILDTDYITEDGKPVIRIFKKENGEFKIEYDRTFEPYFYALLKDDSAIEEVKKITAERHGTVVTVKRVEKVQKKFLGRPVEVWKLYFTHPQDVPAIRDKIREHPAVIDIYEYDIPPAKRYLIIKGLVPMEGDEELKMLAFDIETLYHEGEEFAEGPILMISYADEEGARVITWKNVDLPYVDVVSTEREMIKRFLRVVKEKDPDVLITYNGDNFDFAYLKKRCEKLGINFALGRDGSEPKIQRMGDRFAVEVKGRIHFDLYPVIRRTINLPTYTLEAVYEAVFGQPKEKVYAEEITTAWETGENLERVARYSMEDAKVTYELGKEFLPMEAQLSRLIGQSLWDVSRSSTGNLVEWFLLRKAYERNELAPNKPDEKELARRRQSYEGGYVKEPERGLWENIVYLDFRSLYPSIIITHNVSPDTLNREGCKEYDVAPQVGHRFCKDFPGFIPSLLGDLLEERQKIKKKMKATIDPIERKLLDYRQRAIKILANSYYGYYGYARARWYCKECAESVTAWGREYITMTIKEIEEKYGFKVIYSDTDGFFATIPGADAETVKKKAMEFLKYINAKLPGALELEYEGFYKRGFFVTKKKYAVIDEEGKITTRGLEIVRRDWSEIAKETQARVLEALLKDGDVEKAVRIVKEVTEKLSKYEVPPEKLVIHEQITRDLKDYKATGPHVAVAKRLAARGVKIRPGTVISYIVLKGSGRIGDRAIPFDEFDPTKHKYDAEYYIENQVLPAVERILRAFGYRKEDLRYQKTRQVGLSAWLKPKGT

SEQ ID NO: 3201 - protein, 774 aa, synthetic construct
MILDTDYITEDGKPVIRIFKKENGEFKIEYDRTFEPYFYALLKDDSAIEEVKKITAERHGTVVTVKRVEKVQKKFLGRPVEVWKLYFTHPQDVPAIRDKIREHPAVIDIYEYDIPPAKQYLIIKGLVPMEGDEELKMLAFDIETLYHEGEEFAEGPILMISYADEEGARVITWKNVDLPYVDVVSTEREMIKRFLRVVKEKDPDVLITYNGDNFDFAYLKKRCEKLGINFALGRDGSEPKIQRMGDRFAVEVKGRIHFDLYPVIRRTINLPTYTLEAVYEAVFGQPKEKVYAEEITTAWETGENLERVARYSMEDAKVTYELGKEFLPMEAQLSRLIGQSLWDVSRSSTGNLVEWFLLRKAYERNELAPNKPDEKELARRRQSYEGGYVKEPERGLWENIVYLDFRSLYPSIIITHNVSPDTLNREGCKEYDVAPQVGHRFCKDFPGFIPSLLGDLLEERQKIKKKMKATIDPIERKLLDYRQRAIKILANSYYGYYGYARARWYCKECAESVTAWGREYITMTIKEIEEKYGFKVIYSDTDGFFATIPGADAETVKKKAMEFLKYINAKLPGALELEYEGFYKRGFFVTKKKYAVIDEEGKITTRGLEIVRRDWSEIAKETQARVLEALLKDGDVEKAVRIVKEVTEKLSKYEVPPEKLVIHEQITRDLKDYKATGPHVAVAKRLAARGVKIRPGTVISYIVLKGSGRIGDRAIPFDEFDPTKHKYDAEYYIENQVLPAVERILRAFGYRKEDLRYQKTRQVGLSAWLKPKGT

SEQ ID NO: 3202 - protein, 774 aa, synthetic construct
MILDTDYITEDGKPVIRIFKKENGEFKIEYDRTFEPYFYALLKDDSAIEEVKKITAERHGTVVTVKRVEKVQKKFLGRPVEVWKLYFTDPQDVPAIRDKIREHPAVIDIYEYDIPFMKRYLIDKGLVPMEGDEELKMLAFDIETLYHEGEEFAEGPILMISYADEEGARVITWKNVDLPYVDVVSTEREMIKRFLRVVKEKDPDVLITYNGDNFDFAYLKKRCEKLGINFALGRDGSEPKIQRMGDRFAVEVKGRIHFDLYPVIRRTINLPTYTLEAVYEAVFGQPKEKVYAEEITTAWETGENLERVARYSMEDAKVTYELGKEFLPMEAQLSRLIGQSLWDVSRSSTGNLVEWFLLRKAYERNELAPNKPDEKELARRRQSYEGGYVKEPERGLWENIVYLDFRSLYPSIIITHNVSPDTLNREGCKEYDVAPQVGHRFCKDFPGFIPSLLGDLLEERQKIKKKMKATIDPIERKLLDYRQRAIKILANSYYGYYGYARARWYCKECAESVTAWGREYITMTIKEIEEKYGFKVIYSDTDGFFATIPGADAETVKKKAMEFLKYINAKLPGALELEYEGFYKRGFFVTKKKYAVIDEEGKITTRGLEIVRRDWSEIAKETQARVLEALLKDGDVEKAVRIVKEVTEKLSKYEVPPEKLVIHEQITRDLKDYKATGPHVAVAKRLAARGVKIRPGTVISYIVLKGSGRIGDRAIPFDEFDPTKHKYDAEYYIENQVLPAVERILRAFGYRKEDLRYQKTRQVGLSAWLKPKGT

SEQ ID NO: 3203 - protein, 774 aa, synthetic construct
MILDTDYITEDGKPVIRIFKKENGEFKIEYDRTFEPYFYALLKDDSAIEEVKKITAERHGTVVTVKRVEKVQKKFLGRPVEVWKLYFTDPQDVPAIRDKIREHPAVIDIYEYDIPFMKRYLIIKGLVPMEGDEELKMLAFDIETLYHEGEEFAEGPILMISYADEEGARVITWKNVDLPYVDVVSTEREMIKRFLRVVKEKDPDVLITYNGDNFDFAYLKKRCEKLGINFALGRDGSEPKIQRMGDRFAVEVKGRIHFDLYPVIRRTINLPTYTLEAVYEAVFGQPKEKVYAEEITTAWETGENLERVARYSMEDAKVTYELGKEFLPMEAQLSRLIGQSLWDVSRSSTGNLVEWFLLRKAYERNELAPNKPDEKELARRRQSYEGGYVKEPERGLWENIVYLDFRSLYPSIIITHNVSPDTLNREGCKEYDVAPQVGHRFCKDFPGFIPSLLGDLLEERQKIKKKMKATIDPIERKLLDYRQRAIKILANSYYGYYGYARARWYCKECAESVTAWGREYITMTIKEIEEKYGFKVIYSDTDGFFATIPGADAETVKKKAMEFLKYINAKLPGALELEYEGFYKRGFFVTKKKYAVIDEEGKITTRGLEIVRRDWSEIAKETQARVLEALLKDGDVEKAVRIVKEVTEKLSKYEVPPEKLVIHEQITRDLKDYKATGPHVAVAKRLAARGVKIRPGTVISYIVLKGSGRIGDRAIPFDEFDPTKHKYDAEYYIENQVLPAVERILRAFGYRKEDLRYQKTRQVGLSAWLKPKGT

SEQ ID NO: 3204 - protein, 774 aa, synthetic construct
MILDTDYITEDGKPVIRIFKKENGEFKIEYDRTFEPYFYALLKDDSAIEEVKKITAERHGTVVTVKRVEKVQKKFLGRPVEVWKLYFTDPQDVPAIRDKIREHPAVIDIYEYDIPPAKRYLIDKGLVPMEGDEELKMLAFDIETLYHEGEEFAEGPILMISYADEEGARVITWKNVDLPYVDVVSTEREMIKRFLRVVKEKDPDVLITYNGDNFDFAYLKKRCEKLGINFALGRDGSEPKIQRMGDRFAVEVKGRIHFDLYPVIRRTINLPTYTLEAVYEAVFGQPKEKVYAEEITTAWETGENLERVARYSMEDAKVTYELGKEFLPMEAQLSRLIGQSLWDVSRSSTGNLVEWFLLRKAYERNELAPNKPDEKELARRRQSYEGGYVKEPERGLWENIVYLDFRSLYPSIIITHNVSPDTLNREGCKEYDVAPQVGHRFCKDFPGFIPSLLGDLLEERQKIKKKMKATIDPIERKLLDYRQRAIKILANSYYGYYGYARARWYCKECAESVTAWGREYITMTIKEIEEKYGFKVIYSDTDGFFATIPGADAETVKKKAMEFLKYINAKLPGALELEYEGFYKRGFFVTKKKYAVIDEEGKITTRGLEIVRRDWSEIAKETQARVLEALLKDGDVEKAVRIVKEVTEKLSKYEVPPEKLVIHEQITRDLKDYKATGPHVAVAKRLAARGVKIRPGTVISYIVLKGSGRIGDRAIPFDEFDPTKHKYDAEYYIENQVLPAVERILRAFGYRKEDLRYQKTRQVGLSAWLKPKGT

SEQ ID NO: 3205 - protein, 774 aa, synthetic construct
MILDTDYITEDGKPVIRIFKKENGEFKIEYDRTFEPYFYALLKDDSAIEEVKKITAERHGTVVTVKRVEKVQKKFLGRPVEVWKLYFTDPQDVPAIRDKIREHPAVIDIYEYDIPPMKRYLIDKGLVPMEGDEELKMLAFDIETLYHEGEEFAEGPILMISYADEEGARVITWKNVDLPYVDVVSTEREMIKRFLRVVKEKDPDVLITYNGDNFDFAYLKKRCEKLGINFALGRDGSEPKIQRMGDRFAVEVKGRIHFDLYPVIRRTINLPTYTLEAVYEAVFGQPKEKVYAEEITTAWETGENLERVARYSMEDAKVTYELGKEFLPMEAQLSRLIGQSLWDVSRSSTGNLVEWFLLRKAYERNELAPNKPDEKELARRRQSYEGGYVKEPERGLWENIVYLDFRSLYPSIIITHNVSPDTLNREGCKEYDVAPQVGHRFCKDFPGFIPSLLGDLLEERQKIKKKMKATIDPIERKLLDYRQRAIKILANSYYGYYGYARARWYCKECAESVTAWGREYITMTIKEIEEKYGFKVIYSDTDGFFATIPGADAETVKKKAMEFLKYINAKLPGALELEYEGFYKRGFFVTKKKYAVIDEEGKITTRGLEIVRRDWSEIAKETQARVLEALLKDGDVEKAVRIVKEVTEKLSKYEVPPEKLVIHEQITRDLKDYKATGPHVAVAKRLAARGVKIRPGTVISYIVLKGSGRIGDRAIPFDEFDPTKHKYDAEYYIENQVLPAVERILRAFGYRKEDLRYQKTRQVGLSAWLKPKGT

SEQ ID NO: 3206 - protein, 774 aa, synthetic construct
MILDTDYITEDGKPVIRIFKKENGEFKIEYDRTFEPYFYALLKDDSAIEEVKKITAERHGTVVTVKRVEKVQKKFLGRPVEVWKLYFTDPQDVPAIRDKIREHPAVIDIYEYDIPPAKRYLIIKGLVPMEGDEELKMLAFDIETLYHEGEEFAEGPILMISYADEEGARVITWKNVDLPYVDVVSTEREMIKRFLRVVKEKDPDVLITYNGDNFDFAYLKKRCEKLGINFALGRDGSEPKIQRMGDRFAVEVKGRIHFDLYPVIRRTINLPTYTLEAVYEAVFGQPKEKVYAEEITTAWETGENLERVARYSMEDAKVTYELGKEFLPMEAQLSRLIGQSLWDVSRSSTGNLVEWFLLRKAYERNELAPNKPDEKELARRRQSYEGGYVKEPERGLWENIVYLDFRSLYPSIIITHNVSPDTLNREGCKEYDVAPQVGHRFCKDFPGFIPSLLGDLLEERQKIKKKMKATIDPIERKLLDYRQRAIKILANSYYGYYGYARARWYCKECAESVTAWGREYITMTIKEIEEKYGFKVIYSDTDGFFATIPGADAETVKKKAMEFLKYINAKLPGALELEYEGFYKRGFFVTKKKYAVIDEEGKITTRGLEIVRRDWSEIAKETQARVLEALLKDGDVEKAVRIVKEVTEKLSKYEVPPEKLVIHEQITRDLKDYKATGPHVAVAKRLAARGVKIRPGTVISYIVLKGSGRIGDRAIPFDEFDPTKHKYDAEYYIENQVLPAVERILRAFGYRKEDLRYQKTRQVGLSAWLKPKGT

SEQ ID NO: 3207 - protein, 774 aa, synthetic construct
MILDTDYITEDGKPVIRIFKKENGEFKIEYDRTFEPYFYALLKDDSAIEEVKKITAERHGTVVTVKRVEKVQKKFLGRPVEVWKLYFTDFQDVPAIRDKIREHPAVIDIYEYDIPFAKRYLIDKGLVPMEGDEELKMLAFDIETLYHEGEEFAEGPILMISYADEEGARVITWKNVDLPYVDVVSTEREMIKRFLRVVKEKDPDVLITYNGDNFDFAYLKKRCEKLGINFALGRDGSEPKIQRMGDRFAVEVKGRIHFDLYPVIRRTINLPTYTLEAVYEAVFGQPKEKVYAEEITTAWETGENLERVARYSMEDAKVTYELGKEFLPMEAQLSRLIGQSLWDVSRSSTGNLVEWFLLRKAYERNELAPNKPDEKELARRRQSYEGGYVKEPERGLWENIVYLDFRSLYPSIIITHNVSPDTLNREGCKEYDVAPQVGHRFCKDFPGFIPSLLGDLLEERQKIKKKMKATIDPIERKLLDYRQRAIKILANSYYGYYGYARARWYCKECAESVTAWGREYITMTIKEIEEKYGFKVIYSDTDGFFATIPGADAETVKKKAMEFLKYINAKLPGALELEYEGFYKRGFFVTKKKYAVIDEEGKITTRGLEIVRRDWSEIAKETQARVLEALLKDGDVEKAVRIVKEVTEKLSKYEVPPEKLVIHEQITRDLKDYKATGPHVAVAKRLAARGVKIRPGTVISYIVLKGSGRIGDRAIPFDEFDPTKHKYDAEYYIENQVLPAVERILRAFGYRKEDLRYQKTRQVGLSAWLKPKGT

SEQ ID NO: 3208 - protein, 774 aa, synthetic construct
MILDTDYITEDGKPVIRIFKKENGEFKIEYDRTFEPYFYALLKDDSAIEEVKKITAERHGTVVTVKRVEKVQKKFLGRPVEVWKLYFTDFQDVPAIRDKIREHPAVIDIYEYDIPFMKRYLIDKGLVPMEGDEELKMLAFDIETLYHEGEEFAEGPILMISYADEEGARVITWKNVDLPYVDVVSTEREMIKRFLRVVKEKDPDVLITYNGDNFDFAYLKKRCEKLGINFALGRDGSEPKIQRMGDRFAVEVKGRIHFDLYPVIRRTINLPTYTLEAVYEAVFGQPKEKVYAEEITTAWETGENLERVARYSMEDAKVTYELGKEFLPMEAQLSRLIGQSLWDVSRSSTGNLVEWFLLRKAYERNELAPNKPDEKELARRRQSYEGGYVKEPERGLWENIVYLDFRSLYPSIIITHNVSPDTLNREGCKEYDVAPQVGHRFCKDFPGFIPSLLGDLLEERQKIKKKMKATIDPIERKLLDYRQRAIKILANSYYGYYGYARARWYCKECAESVTAWGREYITMTIKEIEEKYGFKVIYSDTDGFFATIPGADAETVKKKAMEFLKYINAKLPGALELEYEGFYKRGFFVTKKKYAVIDEEGKITTRGLEIVRRDWSEIAKETQARVLEALLKDGDVEKAVRIVKEVTEKLSKYEVPPEKLVIHEQITRDLKDYKATGPHVAVAKRLAARGVKIRPGTVISYIVLKGSGRIGDRAIPFDEFDPTKHKYDAEYYIENQVLPAVERILRAFGYRKEDLRYQKTRQVGLSAWLKPKGT

SEQ ID NO: 3209 - protein, 774 aa, synthetic construct
MILDTDYITEDGKPVIRIFKKENGEFKIEYDRTFEPYFYALLKDDSAIEEVKKITAERHGTVVTVKRVEKVQKKFLGRPVEVWKLYFTDFQDVPAIRDKIREHPAVIDIYEYDIPFMKRYLIIKGLVPMEGDEELKMLAFDIETLYHEGEEFAEGPILMISYADEEGARVITWKNVDLPYVDVVSTEREMIKRFLRVVKEKDPDVLITYNGDNFDFAYLKKRCEKLGINFALGRDGSEPKIQRMGDRFAVEVKGRIHFDLYPVIRRTINLPTYTLEAVYEAVFGQPKEKVYAEEITTAWETGENLERVARYSMEDAKVTYELGKEFLPMEAQLSRLIGQSLWDVSRSSTGNLVEWFLLRKAYERNELAPNKPDEKELARRRQSYEGGYVKEPERGLWENIVYLDFRSLYPSIIITHNVSPDTLNREGCKEYDVAPQVGHRFCKDFPGFIPSLLGDLLEERQKIKKKMKATIDPIERKLLDYRQRAIKILANSYYGYYGYARARWYCKECAESVTAWGREYITMTIKEIEEKYGFKVIYSDTDGFFATIPGADAETVKKKAMEFLKYINAKLPGALELEYEGFYKRGFFVTKKKYAVIDEEGKITTRGLEIVRRDWSEIAKETQARVLEALLKDGDVEKAVRIVKEVTEKLSKYEVPPEKLVIHEQITRDLKDYKATGPHVAVAKRLAARGVKIRPGTVISYIVLKGSGRIGDRAIPFDEFDPTKHKYDAEYYIENQVLPAVERILRAFGYRKEDLRYQKTRQVGLSAWLKPKGT

SEQ ID NO: 3210 - protein, 774 aa, synthetic construct
MILDTDYITEDGKPVIRIFKKENGEFKIEYDRTFEPYFYALLKDDSAIEEVKKITAERHGTVVTVKRVEKVQKKFLGRPVEVWKLYFTDFQDVPAIRDKIREHPAVIDIYEYDIPPAKRYLIDKGLVPMEGDEELKMLAFDIETLYHEGEEFAEGPILMISYADEEGARVITWKNVDLPYVDVVSTEREMIKRFLRVVKEKDPDVLITYNGDNFDFAYLKKRCEKLGINFALGRDGSEPKIQRMGDRFAVEVKGRIHFDLYPVIRRTINLPTYTLEAVYEAVFGQPKEKVYAEEITTAWETGENLERVARYSMEDAKVTYELGKEFLPMEAQLSRLIGQSLWDVSRSSTGNLVEWFLLRKAYERNELAPNKPDEKELARRRQSYEGGYVKEPERGLWENIVYLDFRSLYPSIIITHNVSPDTLNREGCKEYDVAPQVGHRFCKDFPGFIPSLLGDLLEERQKIKKKMKATIDPIERKLLDYRQRAIKILANSYYGYYGYARARWYCKECAESVTAWGREYITMTIKEIEEKYGFKVIYSDTDGFFATIPGADAETVKKKAMEFLKYINAKLPGALELEYEGFYKRGFFVTKKKYAVIDEEGKITTRGLEIVRRDWSEIAKETQARVLEALLKDGDVEKAVRIVKEVTEKLSKYEVPPEKLVIHEQITRDLKDYKATGPHVAVAKRLAARGVKIRPGTVISYIVLKGSGRIGDRAIPFDEFDPTKHKYDAEYYIENQVLPAVERILRAFGYRKEDLRYQKTRQVGLSAWLKPKGT

SEQ ID NO: 3211 - protein, 774 aa, synthetic construct
MILDTDYITEDGKPVIRIFKKENGEFKIEYDRTFEPYFYALLKDDSAIEEVKKITAERHGTVVTVKRVEKVQKKFLGRPVEVWKLYFTDFQDVPAIRDKIREHPAVIDIYEYDIPPMKRYLIDKGLVPMEGDEELKMLAFDIETLYHEGEEFAEGPILMISYADEEGARVITWKNVDLPYVDVVSTEREMIKRFLRVVKEKDPDVLITYNGDNFDFAYLKKRCEKLGINFALGRDGSEPKIQRMGDRFAVEVKGRIHFDLYPVIRRTINLPTYTLEAVYEAVFGQPKEKVYAEEITTAWETGENLERVARYSMEDAKVTYELGKEFLPMEAQLSRLIGQSLWDVSRSSTGNLVEWFLLRKAYERNELAPNKPDEKELARRRQSYEGGYVKEPERGLWENIVYLDFRSLYPSIIITHNVSPDTLNREGCKEYDVAPQVGHRFCKDFPGFIPSLLGDLLEERQKIKKKMKATIDPIERKLLDYRQRAIKILANSYYGYYGYARARWYCKECAESVTAWGREYITMTIKEIEEKYGFKVIYSDTDGFFATIPGADAETVKKKAMEFLKYINAKLPGALELEYEGFYKRGFFVTKKKYAVIDEEGKITTRGLEIVRRDWSEIAKETQARVLEALLKDGDVEKAVRIVKEVTEKLSKYEVPPEKLVIHEQITRDLKDYKATGPHVAVAKRLAARGVKIRPGTVISYIVLKGSGRIGDRAIPFDEFDPTKHKYDAEYYIENQVLPAVERILRAFGYRKEDLRYQKTRQVGLSAWLKPKGT

SEQ ID NO: 3212 - protein, 774 aa, synthetic construct
MILDTDYITEDGKPVIRIFKKENGEFKIEYDRTFEPYFYALLKDDSAIEEVKKITAERHGTVVTVKRVEKVQKKFLGRPVEVWKLYFTDFQDVPAIRDKIREHPAVIDIYEYDIPPMKRYLIIKGLVPMEGDEELKMLAFDIETLYHEGEEFAEGPILMISYADEEGARVITWKNVDLPYVDVVSTEREMIKRFLRVVKEKDPDVLITYNGDNFDFAYLKKRCEKLGINFALGRDGSEPKIQRMGDRFAVEVKGRIHFDLYPVIRRTINLPTYTLEAVYEAVFGQPKEKVYAEEITTAWETGENLERVARYSMEDAKVTYELGKEFLPMEAQLSRLIGQSLWDVSRSSTGNLVEWFLLRKAYERNELAPNKPDEKELARRRQSYEGGYVKEPERGLWENIVYLDFRSLYPSIIITHNVSPDTLNREGCKEYDVAPQVGHRFCKDFPGFIPSLLGDLLEERQKIKKKMKATIDPIERKLLDYRQRAIKILANSYYGYYGYARARWYCKECAESVTAWGREYITMTIKEIEEKYGFKVIYSDTDGFFATIPGADAETVKKKAMEFLKYINAKLPGALELEYEGFYKRGFFVTKKKYAVIDEEGKITTRGLEIVRRDWSEIAKETQARVLEALLKDGDVEKAVRIVKEVTEKLSKYEVPPEKLVIHEQITRDLKDYKATGPHVAVAKRLAARGVKIRPGTVISYIVLKGSGRIGDRAIPFDEFDPTKHKYDAEYYIENQVLPAVERILRAFGYRKEDLRYQKTRQVGLSAWLKPKGT

SEQ ID NO: 3213 - protein, 774 aa, synthetic construct
MILDTDYITEDGKPVIRIFKKENGEFKIEYDRTFEPYFYALLKDDSAIEEVKKITAERHGTVVTVKRVEKVQKKFLGRPVEVWKLYFTDFQDVPAIFDKIREHPAVIDIYEYDIPFMKRYLIDKGLVPMEGDEELKMLAFDIETLYHEGEEFAEGPILMISYADEEGARVITWKNVDLPYVDVVSTEREMIKRFLRVVKEKDPDVLITYNGDNFDFAYLKKRCEKLGINFALGRDGSEPKIQRMGDRFAVEVKGRIHFDLYPVIRRTINLPTYTLEAVYEAVFGQPKEKVYAEEITTAWETGENLERVARYSMEDAKVTYELGKEFLPMEAQLSRLIGQSLWDVSRSSTGNLVEWFLLRKAYERNELAPNKPDEKELARRRQSYEGGYVKEPERGLWENIVYLDFRSLYPSIIITHNVSPDTLNREGCKEYDVAPQVGHRFCKDFPGFIPSLLGDLLEERQKIKKKMKATIDPIERKLLDYRQRAIKILANSYYGYYGYARARWYCKECAESVTAWGREYITMTIKEIEEKYGFKVIYSDTDGFFATIPGADAETVKKKAMEFLKYINAKLPGALELEYEGFYKRGFFVTKKKYAVIDEEGKITTRGLEIVRRDWSEIAKETQARVLEALLKDGDVEKAVRIVKEVTEKLSKYEVPPEKLVIHEQITRDLKDYKATGPHVAVAKRLAARGVKIRPGTVISYIVLKGSGRIGDRAIPFDEFDPTKHKYDAEYYIENQVLPAVERILRAFGYRKEDLRYQKTRQVGLSAWLKPKGT

SEQ ID NO: 3214 - protein, 774 aa, synthetic construct
MILDTDYITEDGKPVIRIFKKENGEFKIEYDRTFEPYFYALLKDDSAIEEVKKITAERHGTVVTVKRVEKVQKKFLGRPVEVWKLYFTDFQDVPAIFDKIREHPAVIDIYEYDIPPMKRYLIDKGLVPMEGDEELKMLAFDIETLYHEGEEFAEGPILMISYADEEGARVITWKNVDLPYVDVVSTEREMIKRFLRVVKEKDPDVLITYNGDNFDFAYLKKRCEKLGINFALGRDGSEPKIQRMGDRFAVEVKGRIHFDLYPVIRRTINLPTYTLEAVYEAVFGQPKEKVYAEEITTAWETGENLERVARYSMEDAKVTYELGKEFLPMEAQLSRLIGQSLWDVSRSSTGNLVEWFLLRKAYERNELAPNKPDEKELARRRQSYEGGYVKEPERGLWENIVYLDFRSLYPSIIITHNVSPDTLNREGCKEYDVAPQVGHRFCKDFPGFIPSLLGDLLEERQKIKKKMKATIDPIERKLLDYRQRAIKILANSYYGYYGYARARWYCKECAESVTAWGREYITMTIKEIEEKYGFKVIYSDTDGFFATIPGADAETVKKKAMEFLKYINAKLPGALELEYEGFYKRGFFVTKKKYAVIDEEGKITTRGLEIVRRDWSEIAKETQARVLEALLKDGDVEKAVRIVKEVTEKLSKYEVPPEKLVIHEQITRDLKDYKATGPHVAVAKRLAARGVKIRPGTVISYIVLKGSGRIGDRAIPFDEFDPTKHKYDAEYYIENQVLPAVERILRAFGYRKEDLRYQKTRQVGLSAWLKPKGT

SEQ ID NO: 3215 - protein, 774 aa, synthetic construct
MILDTDYITEDGKPVIRIFKKENGEFKIEYDRTFEPYFYALLKDDSAIEEVKKITAERHGTVVTVKRVEKVQKKFLGRPVEVWKLYFTDFQDKPAIRDKIREHPAVIDIYEYDIPPAKRYLIDKGLVPMEGDEELKMLAFDIETLYHEGEEFAEGPILMISYADEEGARVITWKNVDLPYVDVVSTEREMIKRFLRVVKEKDPDVLITYNGDNFDFAYLKKRCEKLGINFALGRDGSEPKIQRMGDRFAVEVKGRIHFDLYPVIRRTINLPTYTLEAVYEAVFGQPKEKVYAEEITTAWETGENLERVARYSMEDAKVTYELGKEFLPMEAQLSRLIGQSLWDVSRSSTGNLVEWFLLRKAYERNELAPNKPDEKELARRRQSYEGGYVKEPERGLWENIVYLDFRSLYPSIIITHNVSPDTLNREGCKEYDVAPQVGHRFCKDFPGFIPSLLGDLLEERQKIKKKMKATIDPIERKLLDYRQRAIKILANSYYGYYGYARARWYCKECAESVTAWGREYITMTIKEIEEKYGFKVIYSDTDGFFATIPGADAETVKKKAMEFLKYINAKLPGALELEYEGFYKRGFFVTKKKYAVIDEEGKITTRGLEIVRRDWSEIAKETQARVLEALLKDGDVEKAVRIVKEVTEKLSKYEVPPEKLVIHEQITRDLKDYKATGPHVAVAKRLAARGVKIRPGTVISYIVLKGSGRIGDRAIPFDEFDPTKHKYDAEYYIENQVLPAVERILRAFGYRKEDLRYQKTRQVGLSAWLKPKGT

SEQ ID NO: 3216 - protein, 774 aa, synthetic construct
MILDTDYITEDGKPVIRIFKKENGEFKIEYDRTFEPYFYALLKDDSAIEEVKKITAERHGTVVTVKRVEKVQKKFLGRPVEVWKLYFTDFQDKPAIRDKIREHPAVIDIYEYDIPPMKRYLIDKGLVPMEGDEELKMLAFDIETLYHEGEEFAEGPILMISYADEEGARVITWKNVDLPYVDVVSTEREMIKRFLRVVKEKDPDVLITYNGDNFDFAYLKKRCEKLGINFALGRDGSEPKIQRMGDRFAVEVKGRIHFDLYPVIRRTINLPTYTLEAVYEAVFGQPKEKVYAEEITTAWETGENLERVARYSMEDAKVTYELGKEFLPMEAQLSRLIGQSLWDVSRSSTGNLVEWFLLRKAYERNELAPNKPDEKELARRRQSYEGGYVKEPERGLWENIVYLDFRSLYPSIIITHNVSPDTLNREGCKEYDVAPQVGHRFCKDFPGFIPSLLGDLLEERQKIKKKMKATIDPIERKLLDYRQRAIKILANSYYGYYGYARARWYCKECAESVTAWGREYITMTIKEIEEKYGFKVIYSDTDGFFATIPGADAETVKKKAMEFLKYINAKLPGALELEYEGFYKRGFFVTKKKYAVIDEEGKITTRGLEIVRRDWSEIAKETQARVLEALLKDGDVEKAVRIVKEVTEKLSKYEVPPEKLVIHEQITRDLKDYKATGPHVAVAKRLAARGVKIRPGTVISYIVLKGSGRIGDRAIPFDEFDPTKHKYDAEYYIENQVLPAVERILRAFGYRKEDLRYQKTRQVGLSAWLKPKGT

SEQ ID NO: 3217 - protein, 774 aa, synthetic construct
MILDTDYITEDGKPVIRIFKKENGEFKIEYDRTFEPYFYALLKDDSAIEEVKKITAERHGTVVTVKRVEKVQKKFLGRPVEVWKLYFTDFQDKDAIRDKIREHPAVIDIYEYDIPPMKRYLIDKGLVPMEGDEELKMLAFDIETLYHEGEEFAEGPILMISYADEEGARVITWKNVDLPYVDVVSTEREMIKRFLRVVKEKDPDVLITYNGDNFDFAYLKKRCEKLGINFALGRDGSEPKIQRMGDRFAVEVKGRIHFDLYPVIRRTINLPTYTLEAVYEAVFGQPKEKVYAEEITTAWETGENLERVARYSMEDAKVTYELGKEFLPMEAQLSRLIGQSLWDVSRSSTGNLVEWFLLRKAYERNELAPNKPDEKELARRRQSYEGGYVKEPERGLWENIVYLDFRSLYPSIIITHNVSPDTLNREGCKEYDVAPQVGHRFCKDFPGFIPSLLGDLLEERQKIKKKMKATIDPIERKLLDYRQRAIKILANSYYGYYGYARARWYCKECAESVTAWGREYITMTIKEIEEKYGFKVIYSDTDGFFATIPGADAETVKKKAMEFLKYINAKLPGALELEYEGFYKRGFFVTKKKYAVIDEEGKITTRGLEIVRRDWSEIAKETQARVLEALLKDGDVEKAVRIVKEVTEKLSKYEVPPEKLVIHEQITRDLKDYKATGPHVAVAKRLAARGVKIRPGTVISYIVLKGSGRIGDRAIPFDEFDPTKHKYDAEYYIENQVLPAVERILRAFGYRKEDLRYQKTRQVGLSAWLKPKGT

SEQ ID NO: 3218 - protein, 774 aa, synthetic construct
MILDTDYITEDGKPVIRIFKKENGEFKIEYDRTFEPYFYALLKDDSAIEEVKKITAERHGTVVTVKRVEKVQKKFLGRPVEVWKLYFTDPQDVPAIFDKIREHPAVIDIYEYDIPFMKRYLIDKGLVPMEGDEELKMLAFDIETLYHEGEEFAEGPILMISYADEEGARVITWKNVDLPYVDVVSTEREMIKRFLRVVKEKDPDVLITYNGDNFDFAYLKKRCEKLGINFALGRDGSEPKIQRMGDRFAVEVKGRIHFDLYPVIRRTINLPTYTLEAVYEAVFGQPKEKVYAEEITTAWETGENLERVARYSMEDAKVTYELGKEFLPMEAQLSRLIGQSLWDVSRSSTGNLVEWFLLRKAYERNELAPNKPDEKELARRRQSYEGGYVKEPERGLWENIVYLDFRSLYPSIIITHNVSPDTLNREGCKEYDVAPQVGHRFCKDFPGFIPSLLGDLLEERQKIKKKMKATIDPIERKLLDYRQRAIKILANSYYGYYGYARARWYCKECAESVTAWGREYITMTIKEIEEKYGFKVIYSDTDGFFATIPGADAETVKKKAMEFLKYINAKLPGALELEYEGFYKRGFFVTKKKYAVIDEEGKITTRGLEIVRRDWSEIAKETQARVLEALLKDGDVEKAVRIVKEVTEKLSKYEVPPEKLVIHEQITRDLKDYKATGPHVAVAKRLAARGVKIRPGTVISYIVLKGSGRIGDRAIPFDEFDPTKHKYDAEYYIENQVLPAVERILRAFGYRKEDLRYQKTRQVGLSAWLKPKGT

SEQ ID NO: 3219 - protein, 774 aa, synthetic construct
MILDTDYITEDGKPVIRIFKKENGEFKIEYDRTFEPYFYALLKDDSAIEEVKKITAERHGTVVTVKRVEKVQKKFLGRPVEVWKLYFTDPQDKPAIRDKIREHPAVIDIYEYDIPFAKRYLIDKGLVPMEGDEELKMLAFDIETLYHEGEEFAEGPILMISYADEEGARVITWKNVDLPYVDVVSTEREMIKRFLRVVKEKDPDVLITYNGDNFDFAYLKKRCEKLGINFALGRDGSEPKIQRMGDRFAVEVKGRIHFDLYPVIRRTINLPTYTLEAVYEAVFGQPKEKVYAEEITTAWETGENLERVARYSMEDAKVTYELGKEFLPMEAQLSRLIGQSLWDVSRSSTGNLVEWFLLRKAYERNELAPNKPDEKELARRRQSYEGGYVKEPERGLWENIVYLDFRSLYPSIIITHNVSPDTLNREGCKEYDVAPQVGHRFCKDFPGFIPSLLGDLLEERQKIKKKMKATIDPIERKLLDYRQRAIKILANSYYGYYGYARARWYCKECAESVTAWGREYITMTIKEIEEKYGFKVIYSDTDGFFATIPGADAETVKKKAMEFLKYINAKLPGALELEYEGFYKRGFFVTKKKYAVIDEEGKITTRGLEIVRRDWSEIAKETQARVLEALLKDGDVEKAVRIVKEVTEKLSKYEVPPEKLVIHEQITRDLKDYKATGPHVAVAKRLAARGVKIRPGTVISYIVLKGSGRIGDRAIPFDEFDPTKHKYDAEYYIENQVLPAVERILRAFGYRKEDLRYQKTRQVGLSAWLKPKGT

SEQ ID NO: 3220 - protein, 774 aa, synthetic construct
MILDTDYITEDGKPVIRIFKKENGEFKIEYDRTFEPYFYALLKDDSAIEEVKKITAERHGTVVTVKRVEKVQKKFLGRPVEVWKLYFTDPQDKPAIRDKIREHPAVIDIYEYDIPFMKRYLIDKGLVPMEGDEELKMLAFDIETLYHEGEEFAEGPILMISYADEEGARVITWKNVDLPYVDVVSTEREMIKRFLRVVKEKDPDVLITYNGDNFDFAYLKKRCEKLGINFALGRDGSEPKIQRMGDRFAVEVKGRIHFDLYPVIRRTINLPTYTLEAVYEAVFGQPKEKVYAEEITTAWETGENLERVARYSMEDAKVTYELGKEFLPMEAQLSRLIGQSLWDVSRSSTGNLVEWFLLRKAYERNELAPNKPDEKELARRRQSYEGGYVKEPERGLWENIVYLDFRSLYPSIIITHNVSPDTLNREGCKEYDVAPQVGHRFCKDFPGFIPSLLGDLLEERQKIKKKMKATIDPIERKLLDYRQRAIKILANSYYGYYGYARARWYCKECAESVTAWGREYITMTIKEIEEKYGFKVIYSDTDGFFATIPGADAETVKKKAMEFLKYINAKLPGALELEYEGFYKRGFFVTKKKYAVIDEEGKITTRGLEIVRRDWSEIAKETQARVLEALLKDGDVEKAVRIVKEVTEKLSKYEVPPEKLVIHEQITRDLKDYKATGPHVAVAKRLAARGVKIRPGTVISYIVLKGSGRIGDRAIPFDEFDPTKHKYDAEYYIENQVLPAVERILRAFGYRKEDLRYQKTRQVGLSAWLKPKGT

SEQ ID NO: 3221 - protein, 774 aa, synthetic construct
MILDTDYITEDGKPVIRIFKKENGEFKIEYDRTFEPYFYALLKDDSAIEEVKKITAERHGTVVTVKRVEKVQKKFLGRPVEVWKLYFTDPQDKDAIRDKIREHPAVIDIYEYDIPFMKRYLIDKGLVPMEGDEELKMLAFDIETLYHEGEEFAEGPILMISYADEEGARVITWKNVDLPYVDVVSTEREMIKRFLRVVKEKDPDVLITYNGDNFDFAYLKKRCEKLGINFALGRDGSEPKIQRMGDRFAVEVKGRIHFDLYPVIRRTINLPTYTLEAVYEAVFGQPKEKVYAEEITTAWETGENLERVARYSMEDAKVTYELGKEFLPMEAQLSRLIGQSLWDVSRSSTGNLVEWFLLRKAYERNELAPNKPDEKELARRRQSYEGGYVKEPERGLWENIVYLDFRSLYPSIIITHNVSPDTLNREGCKEYDVAPQVGHRFCKDFPGFIPSLLGDLLEERQKIKKKMKATIDPIERKLLDYRQRAIKILANSYYGYYGYARARWYCKECAESVTAWGREYITMTIKEIEEKYGFKVIYSDTDGFFATIPGADAETVKKKAMEFLKYINAKLPGALELEYEGFYKRGFFVTKKKYAVIDEEGKITTRGLEIVRRDWSEIAKETQARVLEALLKDGDVEKAVRIVKEVTEKLSKYEVPPEKLVIHEQITRDLKDYKATGPHVAVAKRLAARGVKIRPGTVISYIVLKGSGRIGDRAIPFDEFDPTKHKYDAEYYIENQVLPAVERILRAFGYRKEDLRYQKTRQVGLSAWLKPKGT

SEQ ID NO: 3222 - protein, 774 aa, synthetic construct
MILDTDYITEDGKPVWRIFKKENGEFKIEYDRTFEPYFYALLKDDSAIEEVKKITAERHGTVVTVKRVEKVQKKFLGRPVEVWKLYFTHPQDVPAIRDKIREHPAVIDIYEYDIPFMKRYLIDKGLVPMEGDEELKMLAFDIETLYHEGEEFAEGPILMISYADEEGARVITWKNVDLPYVDVVSTEREMIKRFLRVVKEKDPDVLITYNGDNFDFAYLKKRCEKLGINFALGRDGSEPKIQRMGDRFAVEVKGRIHFDLYPVIRRTINLPTYTLEAVYEAVFGQPKEKVYAEEITTAWETGENLERVARYSMEDAKVTYELGKEFLPMEAQLSRLIGQSLWDVSRSSTGNLVEWFLLRKAYERNELAPNKPDEKELARRRQSYEGGYVKEPERGLWENIVYLDFRSLYPSIIITHNVSPDTLNREGCKEYDVAPQVGHRFCKDFPGFIPSLLGDLLEERQKIKKKMKATIDPIERKLLDYRQRAIKILANSYYGYYGYARARWYCKECAESVTAWGREYITMTIKEIEEKYGFKVIYSDTDGFFATIPGADAETVKKKAMEFLKYINAKLPGALELEYEGFYKRGFFVTKKKYAVIDEEGKITTRGLEIVRRDWSEIAKETQARVLEALLKDGDVEKAVRIVKEVTEKLSKYEVPPEKLVIHEQITRDLKDYKATGPHVAVAKRLAARGVKIRPGTVISYIVLKGSGRIGDRAIPFDEFDPTKHKYDAEYYIENQVLPAVERILRAFGYRKEDLRYQKTRQVGLSAWLKPKGT

SEQ ID NO: 3223 - protein, 774 aa, synthetic construct
MILDTDYITEDGKPVWRIFKKENGEFKIEYDRTFEPYFYALLKDDSAIEEVKKITAERHGTVVTVKRVEKVQKKFLGRPVEVWKLYFTHPQDVPAIRDKIREHPAVIDIYEYDIPFMKRYLIIKGLVPMEGDEELKMLAFDIETLYHEGEEFAEGPILMISYADEEGARVITWKNVDLPYVDVVSTEREMIKRFLRVVKEKDPDVLITYNGDNFDFAYLKKRCEKLGINFALGRDGSEPKIQRMGDRFAVEVKGRIHFDLYPVIRRTINLPTYTLEAVYEAVFGQPKEKVYAEEITTAWETGENLERVARYSMEDAKVTYELGKEFLPMEAQLSRLIGQSLWDVSRSSTGNLVEWFLLRKAYERNELAPNKPDEKELARRRQSYEGGYVKEPERGLWENIVYLDFRSLYPSIIITHNVSPDTLNREGCKEYDVAPQVGHRFCKDFPGFIPSLLGDLLEERQKIKKKMKATIDPIERKLLDYRQRAIKILANSYYGYYGYARARWYCKECAESVTAWGREYITMTIKEIEEKYGFKVIYSDTDGFFATIPGADAETVKKKAMEFLKYINAKLPGALELEYEGFYKRGFFVTKKKYAVIDEEGKITTRGLEIVRRDWSEIAKETQARVLEALLKDGDVEKAVRIVKEVTEKLSKYEVPPEKLVIHEQITRDLKDYKATGPHVAVAKRLAARGVKIRPGTVISYIVLKGSGRIGDRAIPFDEFDPTKHKYDAEYYIENQVLPAVERILRAFGYRKEDLRYQKTRQVGLSAWLKPKGT

SEQ ID NO: 3224 - protein, 774 aa, synthetic construct
MILDTDYITEDGKPVWRIFKKENGEFKIEYDRTFEPYFYALLKDDSAIEEVKKITAERHGTVVTVKRVEKVQKKFLGRPVEVWKLYFTHPQDVPAIRDKIREHPAVIDIYEYDIPFAKRYLIIKGLVPMEGDEELKMLAFDIETLYHEGEEFAEGPILMISYADEEGARVITWKNVDLPYVDVVSTEREMIKRFLRVVKEKDPDVLITYNGDNFDFAYLKKRCEKLGINFALGRDGSEPKIQRMGDRFAVEVKGRIHFDLYPVIRRTINLPTYTLEAVYEAVFGQPKEKVYAEEITTAWETGENLERVARYSMEDAKVTYELGKEFLPMEAQLSRLIGQSLWDVSRSSTGNLVEWFLLRKAYERNELAPNKPDEKELARRRQSYEGGYVKEPERGLWENIVYLDFRSLYPSIIITHNVSPDTLNREGCKEYDVAPQVGHRFCKDFPGFIPSLLGDLLEERQKIKKKMKATIDPIERKLLDYRQRAIKILANSYYGYYGYARARWYCKECAESVTAWGREYITMTIKEIEEKYGFKVIYSDTDGFFATIPGADAETVKKKAMEFLKYINAKLPGALELEYEGFYKRGFFVTKKKYAVIDEEGKITTRGLEIVRRDWSEIAKETQARVLEALLKDGDVEKAVRIVKEVTEKLSKYEVPPEKLVIHEQITRDLKDYKATGPHVAVAKRLAARGVKIRPGTVISYIVLKGSGRIGDRAIPFDEFDPTKHKYDAEYYIENQVLPAVERILRAFGYRKEDLRYQKTRQVGLSAWLKPKGT

SEQ ID NO: 3225 - protein, 774 aa, synthetic construct
MILDTDYITEDGKPVWRIFKKENGEFKIEYDRTFEPYFYALLKDDSAIEEVKKITAERHGTVVTVKRVEKVQKKFLGRPVEVWKLYFTHPQDVPAIRDKIREHPAVIDIYEYDIPPAKRYLIDKGLVPMEGDEELKMLAFDIETLYHEGEEFAEGPILMISYADEEGARVITWKNVDLPYVDVVSTEREMIKRFLRVVKEKDPDVLITYNGDNFDFAYLKKRCEKLGINFALGRDGSEPKIQRMGDRFAVEVKGRIHFDLYPVIRRTINLPTYTLEAVYEAVFGQPKEKVYAEEITTAWETGENLERVARYSMEDAKVTYELGKEFLPMEAQLSRLIGQSLWDVSRSSTGNLVEWFLLRKAYERNELAPNKPDEKELARRRQSYEGGYVKEPERGLWENIVYLDFRSLYPSIIITHNVSPDTLNREGCKEYDVAPQVGHRFCKDFPGFIPSLLGDLLEERQKIKKKMKATIDPIERKLLDYRQRAIKILANSYYGYYGYARARWYCKECAESVTAWGREYITMTIKEIEEKYGFKVIYSDTDGFFATIPGADAETVKKKAMEFLKYINAKLPGALELEYEGFYKRGFFVTKKKYAVIDEEGKITTRGLEIVRRDWSEIAKETQARVLEALLKDGDVEKAVRIVKEVTEKLSKYEVPPEKLVIHEQITRDLKDYKATGPHVAVAKRLAARGVKIRPGTVISYIVLKGSGRIGDRAIPFDEFDPTKHKYDAEYYIENQVLPAVERILRAFGYRKEDLRYQKTRQVGLSAWLKPKGT

SEQ ID NO: 3226 - protein, 774 aa, synthetic construct
MILDTDYITEDGKPVWRIFKKENGEFKIEYDRTFEPYFYALLKDDSAIEEVKKITAERHGTVVTVKRVEKVQKKFLGRPVEVWKLYFTHPQDVPAIRDKIREHPAVIDIYEYDIPPMKRYLIDKGLVPMEGDEELKMLAFDIETLYHEGEEFAEGPILMISYADEEGARVITWKNVDLPYVDVVSTEREMIKRFLRVVKEKDPDVLITYNGDNFDFAYLKKRCEKLGINFALGRDGSEPKIQRMGDRFAVEVKGRIHFDLYPVIRRTINLPTYTLEAVYEAVFGQPKEKVYAEEITTAWETGENLERVARYSMEDAKVTYELGKEFLPMEAQLSRLIGQSLWDVSRSSTGNLVEWFLLRKAYERNELAPNKPDEKELARRRQSYEGGYVKEPERGLWENIVYLDFRSLYPSIIITHNVSPDTLNREGCKEYDVAPQVGHRFCKDFPGFIPSLLGDLLEERQKIKKKMKATIDPIERKLLDYRQRAIKILANSYYGYYGYARARWYCKECAESVTAWGREYITMTIKEIEEKYGFKVIYSDTDGFFATIPGADAETVKKKAMEFLKYINAKLPGALELEYEGFYKRGFFVTKKKYAVIDEEGKITTRGLEIVRRDWSEIAKETQARVLEALLKDGDVEKAVRIVKEVTEKLSKYEVPPEKLVIHEQITRDLKDYKATGPHVAVAKRLAARGVKIRPGTVISYIVLKGSGRIGDRAIPFDEFDPTKHKYDAEYYIENQVLPAVERILRAFGYRKEDLRYQKTRQVGLSAWLKPKGT

SEQ ID NO: 3227 - protein, 774 aa, synthetic construct
MILDTDYITEDGKPVWRIFKKENGEFKIEYDRTFEPYFYALLKDDSAIEEVKKITAERHGTVVTVKRVEKVQKKFLGRPVEVWKLYFTHPQDVPAIRDKIREHPAVIDIYEYDIPPMKRYLIIKGLVPMEGDEELKMLAFDIETLYHEGEEFAEGPILMISYADEEGARVITWKNVDLPYVDVVSTEREMIKRFLRVVKEKDPDVLITYNGDNFDFAYLKKRCEKLGINFALGRDGSEPKIQRMGDRFAVEVKGRIHFDLYPVIRRTINLPTYTLEAVYEAVFGQPKEKVYAEEITTAWETGENLERVARYSMEDAKVTYELGKEFLPMEAQLSRLIGQSLWDVSRSSTGNLVEWFLLRKAYERNELAPNKPDEKELARRRQSYEGGYVKEPERGLWENIVYLDFRSLYPSIIITHNVSPDTLNREGCKEYDVAPQVGHRFCKDFPGFIPSLLGDLLEERQKIKKKMKATIDPIERKLLDYRQRAIKILANSYYGYYGYARARWYCKECAESVTAWGREYITMTIKEIEEKYGFKVIYSDTDGFFATIPGADAETVKKKAMEFLKYINAKLPGALELEYEGFYKRGFFVTKKKYAVIDEEGKITTRGLEIVRRDWSEIAKETQARVLEALLKDGDVEKAVRIVKEVTEKLSKYEVPPEKLVIHEQITRDLKDYKATGPHVAVAKRLAARGVKIRPGTVISYIVLKGSGRIGDRAIPFDEFDPTKHKYDAEYYIENQVLPAVERILRAFGYRKEDLRYQKTRQVGLSAWLKPKGT

SEQ ID NO: 3228 - protein, 774 aa, synthetic construct
MILDTDYITEDGKPVWRIFKKENGEFKIEYDRTFEPYFYALLKDDSAIEEVKKITAERHGTVVTVKRVEKVQKKFLGRPVEVWKLYFTHPQDVPAIRDKIREHPAVIDIYEYDIPPMKQYLIDKGLVPMEGDEELKMLAFDIETLYHEGEEFAEGPILMISYADEEGARVITWKNVDLPYVDVVSTEREMIKRFLRVVKEKDPDVLITYNGDNFDFAYLKKRCEKLGINFALGRDGSEPKIQRMGDRFAVEVKGRIHFDLYPVIRRTINLPTYTLEAVYEAVFGQPKEKVYAEEITTAWETGENLERVARYSMEDAKVTYELGKEFLPMEAQLSRLIGQSLWDVSRSSTGNLVEWFLLRKAYERNELAPNKPDEKELARRRQSYEGGYVKEPERGLWENIVYLDFRSLYPSIIITHNVSPDTLNREGCKEYDVAPQVGHRFCKDFPGFIPSLLGDLLEERQKIKKKMKATIDPIERKLLDYRQRAIKILANSYYGYYGYARARWYCKECAESVTAWGREYITMTIKEIEEKYGFKVIYSDTDGFFATIPGADAETVKKKAMEFLKYINAKLPGALELEYEGFYKRGFFVTKKKYAVIDEEGKITTRGLEIVRRDWSEIAKETQARVLEALLKDGDVEKAVRIVKEVTEKLSKYEVPPEKLVIHEQITRDLKDYKATGPHVAVAKRLAARGVKIRPGTVISYIVLKGSGRIGDRAIPFDEFDPTKHKYDAEYYIENQVLPAVERILRAFGYRKEDLRYQKTRQVGLSAWLKPKGT

SEQ ID NO: 3229 - protein, 774 aa, synthetic construct
MILDTDYITEDGKPVWRIFKKENGEFKIEYDRTFEPYFYALLKDDSAIEEVKKITAERHGTVVTVKRVEKVQKKFLGRPVEVWKLYFTHPQDVPAIRDKIREHPAVIDIYEYDIPPMKQYLIIKGLVPMEGDEELKMLAFDIETLYHEGEEFAEGPILMISYADEEGARVITWKNVDLPYVDVVSTEREMIKRFLRVVKEKDPDVLITYNGDNFDFAYLKKRCEKLGINFALGRDGSEPKIQRMGDRFAVEVKGRIHFDLYPVIRRTINLPTYTLEAVYEAVFGQPKEKVYAEEITTAWETGENLERVARYSMEDAKVTYELGKEFLPMEAQLSRLIGQSLWDVSRSSTGNLVEWFLLRKAYERNELAPNKPDEKELARRRQSYEGGYVKEPERGLWENIVYLDFRSLYPSIIITHNVSPDTLNREGCKEYDVAPQVGHRFCKDFPGFIPSLLGDLLEERQKIKKKMKATIDPIERKLLDYRQRAIKILANSYYGYYGYARARWYCKECAESVTAWGREYITMTIKEIEEKYGFKVIYSDTDGFFATIPGADAETVKKKAMEFLKYINAKLPGALELEYEGFYKRGFFVTKKKYAVIDEEGKITTRGLEIVRRDWSEIAKETQARVLEALLKDGDVEKAVRIVKEVTEKLSKYEVPPEKLVIHEQITRDLKDYKATGPHVAVAKRLAARGVKIRPGTVISYIVLKGSGRIGDRAIPFDEFDPTKHKYDAEYYIENQVLPAVERILRAFGYRKEDLRYQKTRQVGLSAWLKPKGT

SEQ ID NO: 3230 - protein, 774 aa, synthetic construct
MILDTDYITEDGKPVWRIFKKENGEFKIEYDRTFEPYFYALLKDDSAIEEVKKITAERHGTVVTVKRVEKVQKKFLGRPVEVWKLYFTHPQDVPAIRDKIREHPAVIDIYEYDIPPAKRYLIIKGLVPMEGDEELKMLAFDIETLYHEGEEFAEGPILMISYADEEGARVITWKNVDLPYVDVVSTEREMIKRFLRVVKEKDPDVLITYNGDNFDFAYLKKRCEKLGINFALGRDGSEPKIQRMGDRFAVEVKGRIHFDLYPVIRRTINLPTYTLEAVYEAVFGQPKEKVYAEEITTAWETGENLERVARYSMEDAKVTYELGKEFLPMEAQLSRLIGQSLWDVSRSSTGNLVEWFLLRKAYERNELAPNKPDEKELARRRQSYEGGYVKEPERGLWENIVYLDFRSLYPSIIITHNVSPDTLNREGCKEYDVAPQVGHRFCKDFPGFIPSLLGDLLEERQKIKKKMKATIDPIERKLLDYRQRAIKILANSYYGYYGYARARWYCKECAESVTAWGREYITMTIKEIEEKYGFKVIYSDTDGFFATIPGADAETVKKKAMEFLKYINAKLPGALELEYEGFYKRGFFVTKKKYAVIDEEGKITTRGLEIVRRDWSEIAKETQARVLEALLKDGDVEKAVRIVKEVTEKLSKYEVPPEKLVIHEQITRDLKDYKATGPHVAVAKRLAARGVKIRPGTVISYIVLKGSGRIGDRAIPFDEFDPTKHKYDAEYYIENQVLPAVERILRAFGYRKEDLRYQKTRQVGLSAWLKPKGT

SEQ ID NO: 3231 - protein, 774 aa, synthetic construct
MILDTDYITEDGKPVWRIFKKENGEFKIEYDRTFEPYFYALLKDDSAIEEVKKITAERHGTVVTVKRVEKVQKKFLGRPVEVWKLYFTHPQDVPAIRDKIREHPAVIDIYEYDIPPAKQYLIDKGLVPMEGDEELKMLAFDIETLYHEGEEFAEGPILMISYADEEGARVITWKNVDLPYVDVVSTEREMIKRFLRVVKEKDPDVLITYNGDNFDFAYLKKRCEKLGINFALGRDGSEPKIQRMGDRFAVEVKGRIHFDLYPVIRRTINLPTYTLEAVYEAVFGQPKEKVYAEEITTAWETGENLERVARYSMEDAKVTYELGKEFLPMEAQLSRLIGQSLWDVSRSSTGNLVEWFLLRKAYERNELAPNKPDEKELARRRQSYEGGYVKEPERGLWENIVYLDFRSLYPSIIITHNVSPDTLNREGCKEYDVAPQVGHRFCKDFPGFIPSLLGDLLEERQKIKKKMKATIDPIERKLLDYRQRAIKILANSYYGYYGYARARWYCKECAESVTAWGREYITMTIKEIEEKYGFKVIYSDTDGFFATIPGADAETVKKKAMEFLKYINAKLPGALELEYEGFYKRGFFVTKKKYAVIDEEGKITTRGLEIVRRDWSEIAKETQARVLEALLKDGDVEKAVRIVKEVTEKLSKYEVPPEKLVIHEQITRDLKDYKATGPHVAVAKRLAARGVKIRPGTVISYIVLKGSGRIGDRAIPFDEFDPTKHKYDAEYYIENQVLPAVERILRAFGYRKEDLRYQKTRQVGLSAWLKPKGT

SEQ ID NO: 3232 - protein, 774 aa, synthetic construct
MILDTDYITEDGKPVWRIFKKENGEFKIEYDRTFEPYFYALLKDDSAIEEVKKITAERHGTVVTVKRVEKVQKKFLGRPVEVWKLYFTHPQDVPAIRDKIREHPAVIDIYEYDIPPAKQYLIIKGLVPMEGDEELKMLAFDIETLYHEGEEFAEGPILMISYADEEGARVITWKNVDLPYVDVVSTEREMIKRFLRVVKEKDPDVLITYNGDNFDFAYLKKRCEKLGINFALGRDGSEPKIQRMGDRFAVEVKGRIHFDLYPVIRRTINLPTYTLEAVYEAVFGQPKEKVYAEEITTAWETGENLERVARYSMEDAKVTYELGKEFLPMEAQLSRLIGQSLWDVSRSSTGNLVEWFLLRKAYERNELAPNKPDEKELARRRQSYEGGYVKEPERGLWENIVYLDFRSLYPSIIITHNVSPDTLNREGCKEYDVAPQVGHRFCKDFPGFIPSLLGDLLEERQKIKKKMKATIDPIERKLLDYRQRAIKILANSYYGYYGYARARWYCKECAESVTAWGREYITMTIKEIEEKYGFKVIYSDTDGFFATIPGADAETVKKKAMEFLKYINAKLPGALELEYEGFYKRGFFVTKKKYAVIDEEGKITTRGLEIVRRDWSEIAKETQARVLEALLKDGDVEKAVRIVKEVTEKLSKYEVPPEKLVIHEQITRDLKDYKATGPHVAVAKRLAARGVKIRPGTVISYIVLKGSGRIGDRAIPFDEFDPTKHKYDAEYYIENQVLPAVERILRAFGYRKEDLRYQKTRQVGLSAWLKPKGT

SEQ ID NO: 3233 - protein, 774 aa, synthetic construct
MILDTDYITEDGKPVWRIFKKENGEFKIEYDRTFEPYFYALLKDDSAIEEVKKITAERHGTVVTVKRVEKVQKKFLGRPVEVWKLYFTDPQDVPAIRDKIREHPAVIDIYEYDIPFAKRYLIDKGLVPMEGDEELKMLAFDIETLYHEGEEFAEGPILMISYADEEGARVITWKNVDLPYVDVVSTEREMIKRFLRVVKEKDPDVLITYNGDNFDFAYLKKRCEKLGINFALGRDGSEPKIQRMGDRFAVEVKGRIHFDLYPVIRRTINLPTYTLEAVYEAVFGQPKEKVYAEEITTAWETGENLERVARYSMEDAKVTYELGKEFLPMEAQLSRLIGQSLWDVSRSSTGNLVEWFLLRKAYERNELAPNKPDEKELARRRQSYEGGYVKEPERGLWENIVYLDFRSLYPSIIITHNVSPDTLNREGCKEYDVAPQVGHRFCKDFPGFIPSLLGDLLEERQKIKKKMKATIDPIERKLLDYRQRAIKILANSYYGYYGYARARWYCKECAESVTAWGREYITMTIKEIEEKYGFKVIYSDTDGFFATIPGADAETVKKKAMEFLKYINAKLPGALELEYEGFYKRGFFVTKKKYAVIDEEGKITTRGLEIVRRDWSEIAKETQARVLEALLKDGDVEKAVRIVKEVTEKLSKYEVPPEKLVIHEQITRDLKDYKATGPHVAVAKRLAARGVKIRPGTVISYIVLKGSGRIGDRAIPFDEFDPTKHKYDAEYYIENQVLPAVERILRAFGYRKEDLRYQKTRQVGLSAWLKPKGT

SEQ ID NO: 3234 - protein, 774 aa, synthetic construct
MILDTDYITEDGKPVWRIFKKENGEFKIEYDRTFEPYFYALLKDDSAIEEVKKITAERHGTVVTVKRVEKVQKKFLGRPVEVWKLYFTDPQDVPAIRDKIREHPAVIDIYEYDIPPAKRYLIDKGLVPMEGDEELKMLAFDIETLYHEGEEFAEGPILMISYADEEGARVITWKNVDLPYVDVVSTEREMIKRFLRVVKEKDPDVLITYNGDNFDFAYLKKRCEKLGINFALGRDGSEPKIQRMGDRFAVEVKGRIHFDLYPVIRRTINLPTYTLEAVYEAVFGQPKEKVYAEEITTAWETGENLERVARYSMEDAKVTYELGKEFLPMEAQLSRLIGQSLWDVSRSSTGNLVEWFLLRKAYERNELAPNKPDEKELARRRQSYEGGYVKEPERGLWENIVYLDFRSLYPSIIITHNVSPDTLNREGCKEYDVAPQVGHRFCKDFPGFIPSLLGDLLEERQKIKKKMKATIDPIERKLLDYRQRAIKILANSYYGYYGYARARWYCKECAESVTAWGREYITMTIKEIEEKYGFKVIYSDTDGFFATIPGADAETVKKKAMEFLKYINAKLPGALELEYEGFYKRGFFVTKKKYAVIDEEGKITTRGLEIVRRDWSEIAKETQARVLEALLKDGDVEKAVRIVKEVTEKLSKYEVPPEKLVIHEQITRDLKDYKATGPHVAVAKRLAARGVKIRPGTVISYIVLKGSGRIGDRAIPFDEFDPTKHKYDAEYYIENQVLPAVERILRAFGYRKEDLRYQKTRQVGLSAWLKPKGT

SEQ ID NO: 3235 - protein, 774 aa, synthetic construct
MILDTDYITEDGKPVWRIFKKENGEFKIEYDRTFEPYFYALLKDDSAIEEVKKITAERHGTVVTVKRVEKVQKKFLGRPVEVWKLYFTDPQDVPAIRDKIREHPAVIDIYEYDIPPMKRYLIDKGLVPMEGDEELKMLAFDIETLYHEGEEFAEGPILMISYADEEGARVITWKNVDLPYVDVVSTEREMIKRFLRVVKEKDPDVLITYNGDNFDFAYLKKRCEKLGINFALGRDGSEPKIQRMGDRFAVEVKGRIHFDLYPVIRRTINLPTYTLEAVYEAVFGQPKEKVYAEEITTAWETGENLERVARYSMEDAKVTYELGKEFLPMEAQLSRLIGQSLWDVSRSSTGNLVEWFLLRKAYERNELAPNKPDEKELARRRQSYEGGYVKEPERGLWENIVYLDFRSLYPSIIITHNVSPDTLNREGCKEYDVAPQVGHRFCKDFPGFIPSLLGDLLEERQKIKKKMKATIDPIERKLLDYRQRAIKILANSYYGYYGYARARWYCKECAESVTAWGREYITMTIKEIEEKYGFKVIYSDTDGFFATIPGADAETVKKKAMEFLKYINAKLPGALELEYEGFYKRGFFVTKKKYAVIDEEGKITTRGLEIVRRDWSEIAKETQARVLEALLKDGDVEKAVRIVKEVTEKLSKYEVPPEKLVIHEQITRDLKDYKATGPHVAVAKRLAARGVKIRPGTVISYIVLKGSGRIGDRAIPFDEFDPTKHKYDAEYYIENQVLPAVERILRAFGYRKEDLRYQKTRQVGLSAWLKPKGT

SEQ ID NO: 3236 - protein, 774 aa, synthetic construct
MILDTDYITEDGKPVWRIFKKENGEFKIEYDRTFEPYFYALLKDDSAIEEVKKITAERHGTVVTVKRVEKVQKKFLGRPVEVWKLYFTDFQDVPAIRDKIREHPAVIDIYEYDIPPAKRYLIDKGLVPMEGDEELKMLAFDIETLYHEGEEFAEGPILMISYADEEGARVITWKNVDLPYVDVVSTEREMIKRFLRVVKEKDPDVLITYNGDNFDFAYLKKRCEKLGINFALGRDGSEPKIQRMGDRFAVEVKGRIHFDLYPVIRRTINLPTYTLEAVYEAVFGQPKEKVYAEEITTAWETGENLERVARYSMEDAKVTYELGKEFLPMEAQLSRLIGQSLWDVSRSSTGNLVEWFLLRKAYERNELAPNKPDEKELARRRQSYEGGYVKEPERGLWENIVYLDFRSLYPSIIITHNVSPDTLNREGCKEYDVAPQVGHRFCKDFPGFIPSLLGDLLEERQKIKKKMKATIDPIERKLLDYRQRAIKILANSYYGYYGYARARWYCKECAESVTAWGREYITMTIKEIEEKYGFKVIYSDTDGFFATIPGADAETVKKKAMEFLKYINAKLPGALELEYEGFYKRGFFVTKKKYAVIDEEGKITTRGLEIVRRDWSEIAKETQARVLEALLKDGDVEKAVRIVKEVTEKLSKYEVPPEKLVIHEQITRDLKDYKATGPHVAVAKRLAARGVKIRPGTVISYIVLKGSGRIGDRAIPFDEFDPTKHKYDAEYYIENQVLPAVERILRAFGYRKEDLRYQKTRQVGLSAWLKPKGT

SEQ ID NO: 3237 - protein, 774 aa, synthetic construct
MILDTDYITEDGKPVWRIFKKENGEFKIEYDRTFEHYFYALLKDDSAIEEVKKITAERHGTVVTVKRVEKVQKKFLGRPVEVWKLYFTHPQDVPAIRDKIREHPAVIDIYEYDIPPAKRYLIDKGLVPMEGDEELKMLAFDIETLYHEGEEFAEGPILMISYADEEGARVITWKNVDLPYVDVVSTEREMIKRFLRVVKEKDPDVLITYNGDNFDFAYLKKRCEKLGINFALGRDGSEPKIQRMGDRFAVEVKGRIHFDLYPVIRRTINLPTYTLEAVYEAVFGQPKEKVYAEEITTAWETGENLERVARYSMEDAKVTYELGKEFLPMEAQLSRLIGQSLWDVSRSSTGNLVEWFLLRKAYERNELAPNKPDEKELARRRQSYEGGYVKEPERGLWENIVYLDFRSLYPSIIITHNVSPDTLNREGCKEYDVAPQVGHRFCKDFPGFIPSLLGDLLEERQKIKKKMKATIDPIERKLLDYRQRAIKILANSYYGYYGYARARWYCKECAESVTAWGREYITMTIKEIEEKYGFKVIYSDTDGFFATIPGADAETVKKKAMEFLKYINAKLPGALELEYEGFYKRGFFVTKKKYAVIDEEGKITTRGLEIVRRDWSEIAKETQARVLEALLKDGDVEKAVRIVKEVTEKLSKYEVPPEKLVIHEQITRDLKDYKATGPHVAVAKRLAARGVKIRPGTVISYIVLKGSGRIGDRAIPFDEFDPTKHKYDAEYYIENQVLPAVERILRAFGYRKEDLRYQKTRQVGLSAWLKPKGT

SEQ ID NO: 3238 - protein, 774 aa, synthetic construct
MILDTDYITEDGKPVWRIFKKENGEFKIEYDRTFEHYFYALLKDDSAIEEVKKITAERHGTVVTVKRVEKVQKKFLGRPVEVWKLYFTHPQDVPAIRDKIREHPAVIDIYEYDIPPMKRYLIDKGLVPMEGDEELKMLAFDIETLYHEGEEFAEGPILMISYADEEGARVITWKNVDLPYVDVVSTEREMIKRFLRVVKEKDPDVLITYNGDNFDFAYLKKRCEKLGINFALGRDGSEPKIQRMGDRFAVEVKGRIHFDLYPVIRRTINLPTYTLEAVYEAVFGQPKEKVYAEEITTAWETGENLERVARYSMEDAKVTYELGKEFLPMEAQLSRLIGQSLWDVSRSSTGNLVEWFLLRKAYERNELAPNKPDEKELARRRQSYEGGYVKEPERGLWENIVYLDFRSLYPSIIITHNVSPDTLNREGCKEYDVAPQVGHRFCKDFPGFIPSLLGDLLEERQKIKKKMKATIDPIERKLLDYRQRAIKILANSYYGYYGYARARWYCKECAESVTAWGREYITMTIKEIEEKYGFKVIYSDTDGFFATIPGADAETVKKKAMEFLKYINAKLPGALELEYEGFYKRGFFVTKKKYAVIDEEGKITTRGLEIVRRDWSEIAKETQARVLEALLKDGDVEKAVRIVKEVTEKLSKYEVPPEKLVIHEQITRDLKDYKATGPHVAVAKRLAARGVKIRPGTVISYIVLKGSGRIGDRAIPFDEFDPTKHKYDAEYYIENQVLPAVERILRAFGYRKEDLRYQKTRQVGLSAWLKPKGT

SEQ ID NO: 3239 - protein, 774 aa, synthetic construct
MILDTDYITEDGKPVWRIFKKENGEFKIEYDRTFEHYFYALLKDDSAIEEVKKITAERHGTVVTVKRVEKVQKKFLGRPVEVWKLYFTHPQDVPAIRDKIREHPAVIDIYEYDIPPAKRYLIIKGLVPMEGDEELKMLAFDIETLYHEGEEFAEGPILMISYADEEGARVITWKNVDLPYVDVVSTEREMIKRFLRVVKEKDPDVLITYNGDNFDFAYLKKRCEKLGINFALGRDGSEPKIQRMGDRFAVEVKGRIHFDLYPVIRRTINLPTYTLEAVYEAVFGQPKEKVYAEEITTAWETGENLERVARYSMEDAKVTYELGKEFLPMEAQLSRLIGQSLWDVSRSSTGNLVEWFLLRKAYERNELAPNKPDEKELARRRQSYEGGYVKEPERGLWENIVYLDFRSLYPSIIITHNVSPDTLNREGCKEYDVAPQVGHRFCKDFPGFIPSLLGDLLEERQKIKKKMKATIDPIERKLLDYRQRAIKILANSYYGYYGYARARWYCKECAESVTAWGREYITMTIKEIEEKYGFKVIYSDTDGFFATIPGADAETVKKKAMEFLKYINAKLPGALELEYEGFYKRGFFVTKKKYAVIDEEGKITTRGLEIVRRDWSEIAKETQARVLEALLKDGDVEKAVRIVKEVTEKLSKYEVPPEKLVIHEQITRDLKDYKATGPHVAVAKRLAARGVKIRPGTVISYIVLKGSGRIGDRAIPFDEFDPTKHKYDAEYYIENQVLPAVERILRAFGYRKEDLRYQKTRQVGLSAWLKPKGT

SEQ ID NO: 3240 - protein, 774 aa, synthetic construct
MILDTDYITEDGKPVWRIFKKENGEFKIEYDRTFEHYFYALLKDDSAIEEVKKITAERHGTVVTVKRVEKVQKKFLGRPVEVWKLYFTDPQDVPAIRDKIREHPAVIDIYEYDIPPAKRYLIDKGLVPMEGDEELKMLAFDIETLYHEGEEFAEGPILMISYADEEGARVITWKNVDLPYVDVVSTEREMIKRFLRVVKEKDPDVLITYNGDNFDFAYLKKRCEKLGINFALGRDGSEPKIQRMGDRFAVEVKGRIHFDLYPVIRRTINLPTYTLEAVYEAVFGQPKEKVYAEEITTAWETGENLERVARYSMEDAKVTYELGKEFLPMEAQLSRLIGQSLWDVSRSSTGNLVEWFLLRKAYERNELAPNKPDEKELARRRQSYEGGYVKEPERGLWENIVYLDFRSLYPSIIITHNVSPDTLNREGCKEYDVAPQVGHRFCKDFPGFIPSLLGDLLEERQKIKKKMKATIDPIERKLLDYRQRAIKILANSYYGYYGYARARWYCKECAESVTAWGREYITMTIKEIEEKYGFKVIYSDTDGFFATIPGADAETVKKKAMEFLKYINAKLPGALELEYEGFYKRGFFVTKKKYAVIDEEGKITTRGLEIVRRDWSEIAKETQARVLEALLKDGDVEKAVRIVKEVTEKLSKYEVPPEKLVIHEQITRDLKDYKATGPHVAVAKRLAARGVKIRPGTVISYIVLKGSGRIGDRAIPFDEFDPTKHKYDAEYYIENQVLPAVERILRAFGYRKEDLRYQKTRQVGLSAWLKPKGT

SEQ ID NO: 3241 - protein, 774 aa, synthetic construct
MILDTDYITEDGKPVWRIFKKENGEFKIEYDRTFEHYFYALLKDDSAIEEVKKITAERHGTVVTVKRVEKVQKKFLGRPVEVWKLYFTDPQDVPAIRDKIREHPAVIDIYEYDIPPMKRYLIDKGLVPMEGDEELKMLAFDIETLYHEGEEFAEGPILMISYADEEGARVITWKNVDLPYVDVVSTEREMIKRFLRVVKEKDPDVLITYNGDNFDFAYLKKRCEKLGINFALGRDGSEPKIQRMGDRFAVEVKGRIHFDLYPVIRRTINLPTYTLEAVYEAVFGQPKEKVYAEEITTAWETGENLERVARYSMEDAKVTYELGKEFLPMEAQLSRLIGQSLWDVSRSSTGNLVEWFLLRKAYERNELAPNKPDEKELARRRQSYEGGYVKEPERGLWENIVYLDFRSLYPSIIITHNVSPDTLNREGCKEYDVAPQVGHRFCKDFPGFIPSLLGDLLEERQKIKKKMKATIDPIERKLLDYRQRAIKILANSYYGYYGYARARWYCKECAESVTAWGREYITMTIKEIEEKYGFKVIYSDTDGFFATIPGADAETVKKKAMEFLKYINAKLPGALELEYEGFYKRGFFVTKKKYAVIDEEGKITTRGLEIVRRDWSEIAKETQARVLEALLKDGDVEKAVRIVKEVTEKLSKYEVPPEKLVIHEQITRDLKDYKATGPHVAVAKRLAARGVKIRPGTVISYIVLKGSGRIGDRAIPFDEFDPTKHKYDAEYYIENQVLPAVERILRAFGYRKEDLRYQKTRQVGLSAWLKPKGT

SEQ ID NO: 3242 - protein, 774 aa, synthetic construct
MILDTDYITEDGKPVWRIFKKENGEFKIEYDRTFEHYFYALLKDDSAIEEVKKITAERHGTVVTVKRVEKVQKKFLGRPVEVWKLYFTHFQDVPAIRDKIREHPAVIDIYEYDIPPAKRYLIDKGLVPMEGDEELKMLAFDIETLYHEGEEFAEGPILMISYADEEGARVITWKNVDLPYVDVVSTEREMIKRFLRVVKEKDPDVLITYNGDNFDFAYLKKRCEKLGINFALGRDGSEPKIQRMGDRFAVEVKGRIHFDLYPVIRRTINLPTYTLEAVYEAVFGQPKEKVYAEEITTAWETGENLERVARYSMEDAKVTYELGKEFLPMEAQLSRLIGQSLWDVSRSSTGNLVEWFLLRKAYERNELAPNKPDEKELARRRQSYEGGYVKEPERGLWENIVYLDFRSLYPSIIITHNVSPDTLNREGCKEYDVAPQVGHRFCKDFPGFIPSLLGDLLEERQKIKKKMKATIDPIERKLLDYRQRAIKILANSYYGYYGYARARWYCKECAESVTAWGREYITMTIKEIEEKYGFKVIYSDTDGFFATIPGADAETVKKKAMEFLKYINAKLPGALELEYEGFYKRGFFVTKKKYAVIDEEGKITTRGLEIVRRDWSEIAKETQARVLEALLKDGDVEKAVRIVKEVTEKLSKYEVPPEKLVIHEQITRDLKDYKATGPHVAVAKRLAARGVKIRPGTVISYIVLKGSGRIGDRAIPFDEFDPTKHKYDAEYYIENQVLPAVERILRAFGYRKEDLRYQKTRQVGLSAWLKPKGT

SEQ ID NO: 3243 - protein, 774 aa, synthetic construct
MILDTDYITEDGKPVWRIFKKENGEFKIEYDRTFEHYFYALLKDDSAIEEVKKITAERHGTVVTVKRVEKVQKKFLGRPVEVWKLYFTHPQDVDAIRDKIREHPAVIDIYEYDIPPAKRYLIDKGLVPMEGDEELKMLAFDIETLYHEGEEFAEGPILMISYADEEGARVITWKNVDLPYVDVVSTEREMIKRFLRVVKEKDPDVLITYNGDNFDFAYLKKRCEKLGINFALGRDGSEPKIQRMGDRFAVEVKGRIHFDLYPVIRRTINLPTYTLEAVYEAVFGQPKEKVYAEEITTAWETGENLERVARYSMEDAKVTYELGKEFLPMEAQLSRLIGQSLWDVSRSSTGNLVEWFLLRKAYERNELAPNKPDEKELARRRQSYEGGYVKEPERGLWENIVYLDFRSLYPSIIITHNVSPDTLNREGCKEYDVAPQVGHRFCKDFPGFIPSLLGDLLEERQKIKKKMKATIDPIERKLLDYRQRAIKILANSYYGYYGYARARWYCKECAESVTAWGREYITMTIKEIEEKYGFKVIYSDTDGFFATIPGADAETVKKKAMEFLKYINAKLPGALELEYEGFYKRGFFVTKKKYAVIDEEGKITTRGLEIVRRDWSEIAKETQARVLEALLKDGDVEKAVRIVKEVTEKLSKYEVPPEKLVIHEQITRDLKDYKATGPHVAVAKRLAARGVKIRPGTVISYIVLKGSGRIGDRAIPFDEFDPTKHKYDAEYYIENQVLPAVERILRAFGYRKEDLRYQKTRQVGLSAWLKPKGT

SEQ ID NO: 3244 - protein, 774 aa, synthetic construct
MILDTDYITEDGKPVWRIFKKENGEFKIEYDRTFEHYFYALLKDDSAIEEVKKITAERHGTVVTVKRVEKVQKKFLGRPVEVWKLYFTHPQDVPAIFDKIREHPAVIDIYEYDIPPAKRYLIDKGLVPMEGDEELKMLAFDIETLYHEGEEFAEGPILMISYADEEGARVITWKNVDLPYVDVVSTEREMIKRFLRVVKEKDPDVLITYNGDNFDFAYLKKRCEKLGINFALGRDGSEPKIQRMGDRFAVEVKGRIHFDLYPVIRRTINLPTYTLEAVYEAVFGQPKEKVYAEEITTAWETGENLERVARYSMEDAKVTYELGKEFLPMEAQLSRLIGQSLWDVSRSSTGNLVEWFLLRKAYERNELAPNKPDEKELARRRQSYEGGYVKEPERGLWENIVYLDFRSLYPSIIITHNVSPDTLNREGCKEYDVAPQVGHRFCKDFPGFIPSLLGDLLEERQKIKKKMKATIDPIERKLLDYRQRAIKILANSYYGYYGYARARWYCKECAESVTAWGREYITMTIKEIEEKYGFKVIYSDTDGFFATIPGADAETVKKKAMEFLKYINAKLPGALELEYEGFYKRGFFVTKKKYAVIDEEGKITTRGLEIVRRDWSEIAKETQARVLEALLKDGDVEKAVRIVKEVTEKLSKYEVPPEKLVIHEQITRDLKDYKATGPHVAVAKRLAARGVKIRPGTVISYIVLKGSGRIGDRAIPFDEFDPTKHKYDAEYYIENQVLPAVERILRAFGYRKEDLRYQKTRQVGLSAWLKPKGT

SEQ ID NO: 3245 - protein, 774 aa, synthetic construct
MILDTDYITEDGKPVWRIFKKENGEFKIEYDRTFEHYFYALLKDDSAIEEVKKITAERHGTVVTVKRVEKVQKKFLGRPVEVWKLYFTHPQDVPAIFDKIREHPAVIDIYEYDIPPMKRYLIDKGLVPMEGDEELKMLAFDIETLYHEGEEFAEGPILMISYADEEGARVITWKNVDLPYVDVVSTEREMIKRFLRVVKEKDPDVLITYNGDNFDFAYLKKRCEKLGINFALGRDGSEPKIQRMGDRFAVEVKGRIHFDLYPVIRRTINLPTYTLEAVYEAVFGQPKEKVYAEEITTAWETGENLERVARYSMEDAKVTYELGKEFLPMEAQLSRLIGQSLWDVSRSSTGNLVEWFLLRKAYERNELAPNKPDEKELARRRQSYEGGYVKEPERGLWENIVYLDFRSLYPSIIITHNVSPDTLNREGCKEYDVAPQVGHRFCKDFPGFIPSLLGDLLEERQKIKKKMKATIDPIERKLLDYRQRAIKILANSYYGYYGYARARWYCKECAESVTAWGREYITMTIKEIEEKYGFKVIYSDTDGFFATIPGADAETVKKKAMEFLKYINAKLPGALELEYEGFYKRGFFVTKKKYAVIDEEGKITTRGLEIVRRDWSEIAKETQARVLEALLKDGDVEKAVRIVKEVTEKLSKYEVPPEKLVIHEQITRDLKDYKATGPHVAVAKRLAARGVKIRPGTVISYIVLKGSGRIGDRAIPFDEFDPTKHKYDAEYYIENQVLPAVERILRAFGYRKEDLRYQKTRQVGLSAWLKPKGT

SEQ ID NO: 3246 - protein, 774 aa, synthetic construct
MILDTDYITEDGKPVWRIFKKENGEFKIEYDRTFEHYFYALLKDDSAIEEVKKITAERHGTVVTVKRVEKVQKKFLGRPVEVWKLYFTHPQDKPAIRDKIREHPAVIDIYEYDIPPAKRYLIDKGLVPMEGDEELKMLAFDIETLYHEGEEFAEGPILMISYADEEGARVITWKNVDLPYVDVVSTEREMIKRFLRVVKEKDPDVLITYNGDNFDFAYLKKRCEKLGINFALGRDGSEPKIQRMGDRFAVEVKGRIHFDLYPVIRRTINLPTYTLEAVYEAVFGQPKEKVYAEEITTAWETGENLERVARYSMEDAKVTYELGKEFLPMEAQLSRLIGQSLWDVSRSSTGNLVEWFLLRKAYERNELAPNKPDEKELARRRQSYEGGYVKEPERGLWENIVYLDFRSLYPSIIITHNVSPDTLNREGCKEYDVAPQVGHRFCKDFPGFIPSLLGDLLEERQKIKKKMKATIDPIERKLLDYRQRAIKILANSYYGYYGYARARWYCKECAESVTAWGREYITMTIKEIEEKYGFKVIYSDTDGFFATIPGADAETVKKKAMEFLKYINAKLPGALELEYEGFYKRGFFVTKKKYAVIDEEGKITTRGLEIVRRDWSEIAKETQARVLEALLKDGDVEKAVRIVKEVTEKLSKYEVPPEKLVIHEQITRDLKDYKATGPHVAVAKRLAARGVKIRPGTVISYIVLKGSGRIGDRAIPFDEFDPTKHKYDAEYYIENQVLPAVERILRAFGYRKEDLRYQKTRQVGLSAWLKPKGT

SEQ ID NO: 3247 - protein, 774 aa, synthetic construct
MILDTDYITEDGKPVWRIFKKENGEFKIEYDRTFEHYFYALLKDDSAIEEVKKITAERHGTVVTVKRVEKVQKKFLGRPVEVWKLYFTHPQDKDAIRDKIREHPAVIDIYEYDIPPAKRYLIDKGLVPMEGDEELKMLAFDIETLYHEGEEFAEGPILMISYADEEGARVITWKNVDLPYVDVVSTEREMIKRFLRVVKEKDPDVLITYNGDNFDFAYLKKRCEKLGINFALGRDGSEPKIQRMGDRFAVEVKGRIHFDLYPVIRRTINLPTYTLEAVYEAVFGQPKEKVYAEEITTAWETGENLERVARYSMEDAKVTYELGKEFLPMEAQLSRLIGQSLWDVSRSSTGNLVEWFLLRKAYERNELAPNKPDEKELARRRQSYEGGYVKEPERGLWENIVYLDFRSLYPSIIITHNVSPDTLNREGCKEYDVAPQVGHRFCKDFPGFIPSLLGDLLEERQKIKKKMKATIDPIERKLLDYRQRAIKILANSYYGYYGYARARWYCKECAESVTAWGREYITMTIKEIEEKYGFKVIYSDTDGFFATIPGADAETVKKKAMEFLKYINAKLPGALELEYEGFYKRGFFVTKKKYAVIDEEGKITTRGLEIVRRDWSEIAKETQARVLEALLKDGDVEKAVRIVKEVTEKLSKYEVPPEKLVIHEQITRDLKDYKATGPHVAVAKRLAARGVKIRPGTVISYIVLKGSGRIGDRAIPFDEFDPTKHKYDAEYYIENQVLPAVERILRAFGYRKEDLRYQKTRQVGLSAWLKPKGT

SEQ ID NO: 3248 - protein, 774 aa, synthetic construct
MILDTDYITEDGKPVWRIFKKENGEFKIEYDRTFEHYFYALLKDDSAIEEVKKITAERHGTVVTVKRVEKVQKKFLGRPVEVWKLYFTHPQDKPAIFDKIREHPAVIDIYEYDIPPAKRYLIDKGLVPMEGDEELKMLAFDIETLYHEGEEFAEGPILMISYADEEGARVITWKNVDLPYVDVVSTEREMIKRFLRVVKEKDPDVLITYNGDNFDFAYLKKRCEKLGINFALGRDGSEPKIQRMGDRFAVEVKGRIHFDLYPVIRRTINLPTYTLEAVYEAVFGQPKEKVYAEEITTAWETGENLERVARYSMEDAKVTYELGKEFLPMEAQLSRLIGQSLWDVSRSSTGNLVEWFLLRKAYERNELAPNKPDEKELARRRQSYEGGYVKEPERGLWENIVYLDFRSLYPSIIITHNVSPDTLNREGCKEYDVAPQVGHRFCKDFPGFIPSLLGDLLEERQKIKKKMKATIDPIERKLLDYRQRAIKILANSYYGYYGYARARWYCKECAESVTAWGREYITMTIKEIEEKYGFKVIYSDTDGFFATIPGADAETVKKKAMEFLKYINAKLPGALELEYEGFYKRGFFVTKKKYAVIDEEGKITTRGLEIVRRDWSEIAKETQARVLEALLKDGDVEKAVRIVKEVTEKLSKYEVPPEKLVIHEQITRDLKDYKATGPHVAVAKRLAARGVKIRPGTVISYIVLKGSGRIGDRAIPFDEFDPTKHKYDAEYYIENQVLPAVERILRAFGYRKEDLRYQKTRQVGLSAWLKPKGT

SEQ ID NO: 3249 - protein, 774 aa, synthetic construct
MILDTDYITEDGKPVWRIFKKENGEFKIEYDRTFEPYFYALLKDDSAIEEVKKITAERHGTVVTVKRVEKVQKKFLGRPVEVWKLYFTHFQDVPAIRDKIREHPAVIDIYEYDIPFMKRYLIDKGLVPMEGDEELKMLAFDIETLYHEGEEFAEGPILMISYADEEGARVITWKNVDLPYVDVVSTEREMIKRFLRVVKEKDPDVLITYNGDNFDFAYLKKRCEKLGINFALGRDGSEPKIQRMGDRFAVEVKGRIHFDLYPVIRRTINLPTYTLEAVYEAVFGQPKEKVYAEEITTAWETGENLERVARYSMEDAKVTYELGKEFLPMEAQLSRLIGQSLWDVSRSSTGNLVEWFLLRKAYERNELAPNKPDEKELARRRQSYEGGYVKEPERGLWENIVYLDFRSLYPSIIITHNVSPDTLNREGCKEYDVAPQVGHRFCKDFPGFIPSLLGDLLEERQKIKKKMKATIDPIERKLLDYRQRAIKILANSYYGYYGYARARWYCKECAESVTAWGREYITMTIKEIEEKYGFKVIYSDTDGFFATIPGADAETVKKKAMEFLKYINAKLPGALELEYEGFYKRGFFVTKKKYAVIDEEGKITTRGLEIVRRDWSEIAKETQARVLEALLKDGDVEKAVRIVKEVTEKLSKYEVPPEKLVIHEQITRDLKDYKATGPHVAVAKRLAARGVKIRPGTVISYIVLKGSGRIGDRAIPFDEFDPTKHKYDAEYYIENQVLPAVERILRAFGYRKEDLRYQKTRQVGLSAWLKPKGT

SEQ ID NO: 3250 - protein, 774 aa, synthetic construct
MILDTDYITEDGKPVWRIFKKENGEFKIEYDRTFEPYFYALLKDDSAIEEVKKITAERHGTVVTVKRVEKVQKKFLGRPVEVWKLYFTHFQDVPAIRDKIREHPAVIDIYEYDIPPAKRYLIDKGLVPMEGDEELKMLAFDIETLYHEGEEFAEGPILMISYADEEGARVITWKNVDLPYVDVVSTEREMIKRFLRVVKEKDPDVLITYNGDNFDFAYLKKRCEKLGINFALGRDGSEPKIQRMGDRFAVEVKGRIHFDLYPVIRRTINLPTYTLEAVYEAVFGQPKEKVYAEEITTAWETGENLERVARYSMEDAKVTYELGKEFLPMEAQLSRLIGQSLWDVSRSSTGNLVEWFLLRKAYERNELAPNKPDEKELARRRQSYEGGYVKEPERGLWENIVYLDFRSLYPSIIITHNVSPDTLNREGCKEYDVAPQVGHRFCKDFPGFIPSLLGDLLEERQKIKKKMKATIDPIERKLLDYRQRAIKILANSYYGYYGYARARWYCKECAESVTAWGREYITMTIKEIEEKYGFKVIYSDTDGFFATIPGADAETVKKKAMEFLKYINAKLPGALELEYEGFYKRGFFVTKKKYAVIDEEGKITTRGLEIVRRDWSEIAKETQARVLEALLKDGDVEKAVRIVKEVTEKLSKYEVPPEKLVIHEQITRDLKDYKATGPHVAVAKRLAARGVKIRPGTVISYIVLKGSGRIGDRAIPFDEFDPTKHKYDAEYYIENQVLPAVERILRAFGYRKEDLRYQKTRQVGLSAWLKPKGT

SEQ ID NO: 3251 - protein, 774 aa, synthetic construct
MILDTDYITEDGKPVWRIFKKENGEFKIEYDRTFEPYFYALLKDDSAIEEVKKITAERHGTVVTVKRVEKVQKKFLGRPVEVWKLYFTHFQDVPAIRDKIREHPAVIDIYEYDIPPMKRYLIDKGLVPMEGDEELKMLAFDIETLYHEGEEFAEGPILMISYADEEGARVITWKNVDLPYVDVVSTEREMIKRFLRVVKEKDPDVLITYNGDNFDFAYLKKRCEKLGINFALGRDGSEPKIQRMGDRFAVEVKGRIHFDLYPVIRRTINLPTYTLEAVYEAVFGQPKEKVYAEEITTAWETGENLERVARYSMEDAKVTYELGKEFLPMEAQLSRLIGQSLWDVSRSSTGNLVEWFLLRKAYERNELAPNKPDEKELARRRQSYEGGYVKEPERGLWENIVYLDFRSLYPSIIITHNVSPDTLNREGCKEYDVAPQVGHRFCKDFPGFIPSLLGDLLEERQKIKKKMKATIDPIERKLLDYRQRAIKILANSYYGYYGYARARWYCKECAESVTAWGREYITMTIKEIEEKYGFKVIYSDTDGFFATIPGADAETVKKKAMEFLKYINAKLPGALELEYEGFYKRGFFVTKKKYAVIDEEGKITTRGLEIVRRDWSEIAKETQARVLEALLKDGDVEKAVRIVKEVTEKLSKYEVPPEKLVIHEQITRDLKDYKATGPHVAVAKRLAARGVKIRPGTVISYIVLKGSGRIGDRAIPFDEFDPTKHKYDAEYYIENQVLPAVERILRAFGYRKEDLRYQKTRQVGLSAWLKPKGT

SEQ ID NO: 3252 - protein, 774 aa, synthetic construct
MILDTDYITEDGKPVWRIFKKENGEFKIEYDRTFEPYFYALLKDDSAIEEVKKITAERHGTVVTVKRVEKVQKKFLGRPVEVWKLYFTHFQDVPAIRDKIREHPAVIDIYEYDIPPAKRYLIIKGLVPMEGDEELKMLAFDIETLYHEGEEFAEGPILMISYADEEGARVITWKNVDLPYVDVVSTEREMIKRFLRVVKEKDPDVLITYNGDNFDFAYLKKRCEKLGINFALGRDGSEPKIQRMGDRFAVEVKGRIHFDLYPVIRRTINLPTYTLEAVYEAVFGQPKEKVYAEEITTAWETGENLERVARYSMEDAKVTYELGKEFLPMEAQLSRLIGQSLWDVSRSSTGNLVEWFLLRKAYERNELAPNKPDEKELARRRQSYEGGYVKEPERGLWENIVYLDFRSLYPSIIITHNVSPDTLNREGCKEYDVAPQVGHRFCKDFPGFIPSLLGDLLEERQKIKKKMKATIDPIERKLLDYRQRAIKILANSYYGYYGYARARWYCKECAESVTAWGREYITMTIKEIEEKYGFKVIYSDTDGFFATIPGADAETVKKKAMEFLKYINAKLPGALELEYEGFYKRGFFVTKKKYAVIDEEGKITTRGLEIVRRDWSEIAKETQARVLEALLKDGDVEKAVRIVKEVTEKLSKYEVPPEKLVIHEQITRDLKDYKATGPHVAVAKRLAARGVKIRPGTVISYIVLKGSGRIGDRAIPFDEFDPTKHKYDAEYYIENQVLPAVERILRAFGYRKEDLRYQKTRQVGLSAWLKPKGT

SEQ ID NO: 3253 - protein, 774 aa, synthetic construct
MILDTDYITEDGKPVWRIFKKENGEFKIEYDRTFEPYFYALLKDDSAIEEVKKITAERHGTVVTVKRVEKVQKKFLGRPVEVWKLYFTHFQDVDAIRDKIREHPAVIDIYEYDIPPAKRYLIDKGLVPMEGDEELKMLAFDIETLYHEGEEFAEGPILMISYADEEGARVITWKNVDLPYVDVVSTEREMIKRFLRVVKEKDPDVLITYNGDNFDFAYLKKRCEKLGINFALGRDGSEPKIQRMGDRFAVEVKGRIHFDLYPVIRRTINLPTYTLEAVYEAVFGQPKEKVYAEEITTAWETGENLERVARYSMEDAKVTYELGKEFLPMEAQLSRLIGQSLWDVSRSSTGNLVEWFLLRKAYERNELAPNKPDEKELARRRQSYEGGYVKEPERGLWENIVYLDFRSLYPSIIITHNVSPDTLNREGCKEYDVAPQVGHRFCKDFPGFIPSLLGDLLEERQKIKKKMKATIDPIERKLLDYRQRAIKILANSYYGYYGYARARWYCKECAESVTAWGREYITMTIKEIEEKYGFKVIYSDTDGFFATIPGADAETVKKKAMEFLKYINAKLPGALELEYEGFYKRGFFVTKKKYAVIDEEGKITTRGLEIVRRDWSEIAKETQARVLEALLKDGDVEKAVRIVKEVTEKLSKYEVPPEKLVIHEQITRDLKDYKATGPHVAVAKRLAARGVKIRPGTVISYIVLKGSGRIGDRAIPFDEFDPTKHKYDAEYYIENQVLPAVERILRAFGYRKEDLRYQKTRQVGLSAWLKPKGT

SEQ ID NO: 3254 - protein, 774 aa, synthetic construct
MILDTDYITEDGKPVWRIFKKENGEFKIEYDRTFEPYFYALLKDDSAIEEVKKITAERHGTVVTVKRVEKVQKKFLGRPVEVWKLYFTHFQDVDAIFDKIREHPAVIDIYEYDIPPAKRYLIDKGLVPMEGDEELKMLAFDIETLYHEGEEFAEGPILMISYADEEGARVITWKNVDLPYVDVVSTEREMIKRFLRVVKEKDPDVLITYNGDNFDFAYLKKRCEKLGINFALGRDGSEPKIQRMGDRFAVEVKGRIHFDLYPVIRRTINLPTYTLEAVYEAVFGQPKEKVYAEEITTAWETGENLERVARYSMEDAKVTYELGKEFLPMEAQLSRLIGQSLWDVSRSSTGNLVEWFLLRKAYERNELAPNKPDEKELARRRQSYEGGYVKEPERGLWENIVYLDFRSLYPSIIITHNVSPDTLNREGCKEYDVAPQVGHRFCKDFPGFIPSLLGDLLEERQKIKKKMKATIDPIERKLLDYRQRAIKILANSYYGYYGYARARWYCKECAESVTAWGREYITMTIKEIEEKYGFKVIYSDTDGFFATIPGADAETVKKKAMEFLKYINAKLPGALELEYEGFYKRGFFVTKKKYAVIDEEGKITTRGLEIVRRDWSEIAKETQARVLEALLKDGDVEKAVRIVKEVTEKLSKYEVPPEKLVIHEQITRDLKDYKATGPHVAVAKRLAARGVKIRPGTVISYIVLKGSGRIGDRAIPFDEFDPTKHKYDAEYYIENQVLPAVERILRAFGYRKEDLRYQKTRQVGLSAWLKPKGT

SEQ ID NO: 3255 - protein, 774 aa, synthetic construct
MILDTDYITEDGKPVWRIFKKENGEFKIEYDRTFEPYFYALLKDDSAIEEVKKITAERHGTVVTVKRVEKVQKKFLGRPVEVWKLYFTHFQDVPAIFDKIREHPAVIDIYEYDIPPAKRYLIDKGLVPMEGDEELKMLAFDIETLYHEGEEFAEGPILMISYADEEGARVITWKNVDLPYVDVVSTEREMIKRFLRVVKEKDPDVLITYNGDNFDFAYLKKRCEKLGINFALGRDGSEPKIQRMGDRFAVEVKGRIHFDLYPVIRRTINLPTYTLEAVYEAVFGQPKEKVYAEEITTAWETGENLERVARYSMEDAKVTYELGKEFLPMEAQLSRLIGQSLWDVSRSSTGNLVEWFLLRKAYERNELAPNKPDEKELARRRQSYEGGYVKEPERGLWENIVYLDFRSLYPSIIITHNVSPDTLNREGCKEYDVAPQVGHRFCKDFPGFIPSLLGDLLEERQKIKKKMKATIDPIERKLLDYRQRAIKILANSYYGYYGYARARWYCKECAESVTAWGREYITMTIKEIEEKYGFKVIYSDTDGFFATIPGADAETVKKKAMEFLKYINAKLPGALELEYEGFYKRGFFVTKKKYAVIDEEGKITTRGLEIVRRDWSEIAKETQARVLEALLKDGDVEKAVRIVKEVTEKLSKYEVPPEKLVIHEQITRDLKDYKATGPHVAVAKRLAARGVKIRPGTVISYIVLKGSGRIGDRAIPFDEFDPTKHKYDAEYYIENQVLPAVERILRAFGYRKEDLRYQKTRQVGLSAWLKPKGT

SEQ ID NO: 3256 - protein, 774 aa, synthetic construct
MILDTDYITEDGKPVWRIFKKENGEFKIEYDRTFEPYFYALLKDDSAIEEVKKITAERHGTVVTVKRVEKVQKKFLGRPVEVWKLYFTHFQDVPAIFDKIREHPAVIDIYEYDIPPMKRYLIDKGLVPMEGDEELKMLAFDIETLYHEGEEFAEGPILMISYADEEGARVITWKNVDLPYVDVVSTEREMIKRFLRVVKEKDPDVLITYNGDNFDFAYLKKRCEKLGINFALGRDGSEPKIQRMGDRFAVEVKGRIHFDLYPVIRRTINLPTYTLEAVYEAVFGQPKEKVYAEEITTAWETGENLERVARYSMEDAKVTYELGKEFLPMEAQLSRLIGQSLWDVSRSSTGNLVEWFLLRKAYERNELAPNKPDEKELARRRQSYEGGYVKEPERGLWENIVYLDFRSLYPSIIITHNVSPDTLNREGCKEYDVAPQVGHRFCKDFPGFIPSLLGDLLEERQKIKKKMKATIDPIERKLLDYRQRAIKILANSYYGYYGYARARWYCKECAESVTAWGREYITMTIKEIEEKYGFKVIYSDTDGFFATIPGADAETVKKKAMEFLKYINAKLPGALELEYEGFYKRGFFVTKKKYAVIDEEGKITTRGLEIVRRDWSEIAKETQARVLEALLKDGDVEKAVRIVKEVTEKLSKYEVPPEKLVIHEQITRDLKDYKATGPHVAVAKRLAARGVKIRPGTVISYIVLKGSGRIGDRAIPFDEFDPTKHKYDAEYYIENQVLPAVERILRAFGYRKEDLRYQKTRQVGLSAWLKPKGT

SEQ ID NO: 3257 - protein, 774 aa, synthetic construct
MILDTDYITEDGKPVWRIFKKENGEFKIEYDRTFEPYFYALLKDDSAIEEVKKITAERHGTVVTVKRVEKVQKKFLGRPVEVWKLYFTHFQDKPAIRDKIREHPAVIDIYEYDIPPAKRYLIDKGLVPMEGDEELKMLAFDIETLYHEGEEFAEGPILMISYADEEGARVITWKNVDLPYVDVVSTEREMIKRFLRVVKEKDPDVLITYNGDNFDFAYLKKRCEKLGINFALGRDGSEPKIQRMGDRFAVEVKGRIHFDLYPVIRRTINLPTYTLEAVYEAVFGQPKEKVYAEEITTAWETGENLERVARYSMEDAKVTYELGKEFLPMEAQLSRLIGQSLWDVSRSSTGNLVEWFLLRKAYERNELAPNKPDEKELARRRQSYEGGYVKEPERGLWENIVYLDFRSLYPSIIITHNVSPDTLNREGCKEYDVAPQVGHRFCKDFPGFIPSLLGDLLEERQKIKKKMKATIDPIERKLLDYRQRAIKILANSYYGYYGYARARWYCKECAESVTAWGREYITMTIKEIEEKYGFKVIYSDTDGFFATIPGADAETVKKKAMEFLKYINAKLPGALELEYEGFYKRGFFVTKKKYAVIDEEGKITTRGLEIVRRDWSEIAKETQARVLEALLKDGDVEKAVRIVKEVTEKLSKYEVPPEKLVIHEQITRDLKDYKATGPHVAVAKRLAARGVKIRPGTVISYIVLKGSGRIGDRAIPFDEFDPTKHKYDAEYYIENQVLPAVERILRAFGYRKEDLRYQKTRQVGLSAWLKPKGT

SEQ ID NO: 3258 - protein, 774 aa, synthetic construct
MILDTDYITEDGKPVWRIFKKENGEFKIEYDRTFEPYFYALLKDDSAIEEVKKITAERHGTVVTVKRVEKVQKKFLGRPVEVWKLYFTHFQDKDAIRDKIREHPAVIDIYEYDIPPAKRYLIDKGLVPMEGDEELKMLAFDIETLYHEGEEFAEGPILMISYADEEGARVITWKNVDLPYVDVVSTEREMIKRFLRVVKEKDPDVLITYNGDNFDFAYLKKRCEKLGINFALGRDGSEPKIQRMGDRFAVEVKGRIHFDLYPVIRRTINLPTYTLEAVYEAVFGQPKEKVYAEEITTAWETGENLERVARYSMEDAKVTYELGKEFLPMEAQLSRLIGQSLWDVSRSSTGNLVEWFLLRKAYERNELAPNKPDEKELARRRQSYEGGYVKEPERGLWENIVYLDFRSLYPSIIITHNVSPDTLNREGCKEYDVAPQVGHRFCKDFPGFIPSLLGDLLEERQKIKKKMKATIDPIERKLLDYRQRAIKILANSYYGYYGYARARWYCKECAESVTAWGREYITMTIKEIEEKYGFKVIYSDTDGFFATIPGADAETVKKKAMEFLKYINAKLPGALELEYEGFYKRGFFVTKKKYAVIDEEGKITTRGLEIVRRDWSEIAKETQARVLEALLKDGDVEKAVRIVKEVTEKLSKYEVPPEKLVIHEQITRDLKDYKATGPHVAVAKRLAARGVKIRPGTVISYIVLKGSGRIGDRAIPFDEFDPTKHKYDAEYYIENQVLPAVERILRAFGYRKEDLRYQKTRQVGLSAWLKPKGT

SEQ ID NO: 3259 - protein, 774 aa, synthetic construct
MILDTDYITEDGKPVWRIFKKENGEFKIEYDRTFEPYFYALLKDDSAIEEVKKITAERHGTVVTVKRVEKVQKKFLGRPVEVWKLYFTHFQDKDAIFDKIREHPAVIDIYEYDIPPAKRYLIDKGLVPMEGDEELKMLAFDIETLYHEGEEFAEGPILMISYADEEGARVITWKNVDLPYVDVVSTEREMIKRFLRVVKEKDPDVLITYNGDNFDFAYLKKRCEKLGINFALGRDGSEPKIQRMGDRFAVEVKGRIHFDLYPVIRRTINLPTYTLEAVYEAVFGQPKEKVYAEEITTAWETGENLERVARYSMEDAKVTYELGKEFLPMEAQLSRLIGQSLWDVSRSSTGNLVEWFLLRKAYERNELAPNKPDEKELARRRQSYEGGYVKEPERGLWENIVYLDFRSLYPSIIITHNVSPDTLNREGCKEYDVAPQVGHRFCKDFPGFIPSLLGDLLEERQKIKKKMKATIDPIERKLLDYRQRAIKILANSYYGYYGYARARWYCKECAESVTAWGREYITMTIKEIEEKYGFKVIYSDTDGFFATIPGADAETVKKKAMEFLKYINAKLPGALELEYEGFYKRGFFVTKKKYAVIDEEGKITTRGLEIVRRDWSEIAKETQARVLEALLKDGDVEKAVRIVKEVTEKLSKYEVPPEKLVIHEQITRDLKDYKATGPHVAVAKRLAARGVKIRPGTVISYIVLKGSGRIGDRAIPFDEFDPTKHKYDAEYYIENQVLPAVERILRAFGYRKEDLRYQKTRQVGLSAWLKPKGT

SEQ ID NO: 3260 - protein, 774 aa, synthetic construct
MILDTDYITEDGKPVWRIFKKENGEFKIEYDRTFEPYFYALLKDDSAIEEVKKITAERHGTVVTVKRVEKVQKKFLGRPVEVWKLYFTHFQDKPAIFDKIREHPAVIDIYEYDIPPAKRYLIDKGLVPMEGDEELKMLAFDIETLYHEGEEFAEGPILMISYADEEGARVITWKNVDLPYVDVVSTEREMIKRFLRVVKEKDPDVLITYNGDNFDFAYLKKRCEKLGINFALGRDGSEPKIQRMGDRFAVEVKGRIHFDLYPVIRRTINLPTYTLEAVYEAVFGQPKEKVYAEEITTAWETGENLERVARYSMEDAKVTYELGKEFLPMEAQLSRLIGQSLWDVSRSSTGNLVEWFLLRKAYERNELAPNKPDEKELARRRQSYEGGYVKEPERGLWENIVYLDFRSLYPSIIITHNVSPDTLNREGCKEYDVAPQVGHRFCKDFPGFIPSLLGDLLEERQKIKKKMKATIDPIERKLLDYRQRAIKILANSYYGYYGYARARWYCKECAESVTAWGREYITMTIKEIEEKYGFKVIYSDTDGFFATIPGADAETVKKKAMEFLKYINAKLPGALELEYEGFYKRGFFVTKKKYAVIDEEGKITTRGLEIVRRDWSEIAKETQARVLEALLKDGDVEKAVRIVKEVTEKLSKYEVPPEKLVIHEQITRDLKDYKATGPHVAVAKRLAARGVKIRPGTVISYIVLKGSGRIGDRAIPFDEFDPTKHKYDAEYYIENQVLPAVERILRAFGYRKEDLRYQKTRQVGLSAWLKPKGT

SEQ ID NO: 3261 - protein, 774 aa, synthetic construct
MILDTDYITEDGKPVWRIFKKENGEFKIEYDRTFEPYFYALLKDDSAIEEVKKITAERHGTVVTVKRVEKVQKKFLGRPVEVWKLYFTHPQDVDAIRDKIREHPAVIDIYEYDIPFAKRYLIDKGLVPMEGDEELKMLAFDIETLYHEGEEFAEGPILMISYADEEGARVITWKNVDLPYVDVVSTEREMIKRFLRVVKEKDPDVLITYNGDNFDFAYLKKRCEKLGINFALGRDGSEPKIQRMGDRFAVEVKGRIHFDLYPVIRRTINLPTYTLEAVYEAVFGQPKEKVYAEEITTAWETGENLERVARYSMEDAKVTYELGKEFLPMEAQLSRLIGQSLWDVSRSSTGNLVEWFLLRKAYERNELAPNKPDEKELARRRQSYEGGYVKEPERGLWENIVYLDFRSLYPSIIITHNVSPDTLNREGCKEYDVAPQVGHRFCKDFPGFIPSLLGDLLEERQKIKKKMKATIDPIERKLLDYRQRAIKILANSYYGYYGYARARWYCKECAESVTAWGREYITMTIKEIEEKYGFKVIYSDTDGFFATIPGADAETVKKKAMEFLKYINAKLPGALELEYEGFYKRGFFVTKKKYAVIDEEGKITTRGLEIVRRDWSEIAKETQARVLEALLKDGDVEKAVRIVKEVTEKLSKYEVPPEKLVIHEQITRDLKDYKATGPHVAVAKRLAARGVKIRPGTVISYIVLKGSGRIGDRAIPFDEFDPTKHKYDAEYYIENQVLPAVERILRAFGYRKEDLRYQKTRQVGLSAWLKPKGT

SEQ ID NO: 3262 - protein, 774 aa, synthetic construct
MILDTDYITEDGKPVWRIFKKENGEFKIEYDRTFEPYFYALLKDDSAIEEVKKITAERHGTVVTVKRVEKVQKKFLGRPVEVWKLYFTHPQDVDAIRDKIREHPAVIDIYEYDIPPAKRYLIDKGLVPMEGDEELKMLAFDIETLYHEGEEFAEGPILMISYADEEGARVITWKNVDLPYVDVVSTEREMIKRFLRVVKEKDPDVLITYNGDNFDFAYLKKRCEKLGINFALGRDGSEPKIQRMGDRFAVEVKGRIHFDLYPVIRRTINLPTYTLEAVYEAVFGQPKEKVYAEEITTAWETGENLERVARYSMEDAKVTYELGKEFLPMEAQLSRLIGQSLWDVSRSSTGNLVEWFLLRKAYERNELAPNKPDEKELARRRQSYEGGYVKEPERGLWENIVYLDFRSLYPSIIITHNVSPDTLNREGCKEYDVAPQVGHRFCKDFPGFIPSLLGDLLEERQKIKKKMKATIDPIERKLLDYRQRAIKILANSYYGYYGYARARWYCKECAESVTAWGREYITMTIKEIEEKYGFKVIYSDTDGFFATIPGADAETVKKKAMEFLKYINAKLPGALELEYEGFYKRGFFVTKKKYAVIDEEGKITTRGLEIVRRDWSEIAKETQARVLEALLKDGDVEKAVRIVKEVTEKLSKYEVPPEKLVIHEQITRDLKDYKATGPHVAVAKRLAARGVKIRPGTVISYIVLKGSGRIGDRAIPFDEFDPTKHKYDAEYYIENQVLPAVERILRAFGYRKEDLRYQKTRQVGLSAWLKPKGT

SEQ ID NO: 3263 - protein, 774 aa, synthetic construct
MILDTDYITEDGKPVWRIFKKENGEFKIEYDRTFEPYFYALLKDDSAIEEVKKITAERHGTVVTVKRVEKVQKKFLGRPVEVWKLYFTHPQDVDAIRDKIREHPAVIDIYEYDIPPMKRYLIDKGLVPMEGDEELKMLAFDIETLYHEGEEFAEGPILMISYADEEGARVITWKNVDLPYVDVVSTEREMIKRFLRVVKEKDPDVLITYNGDNFDFAYLKKRCEKLGINFALGRDGSEPKIQRMGDRFAVEVKGRIHFDLYPVIRRTINLPTYTLEAVYEAVFGQPKEKVYAEEITTAWETGENLERVARYSMEDAKVTYELGKEFLPMEAQLSRLIGQSLWDVSRSSTGNLVEWFLLRKAYERNELAPNKPDEKELARRRQSYEGGYVKEPERGLWENIVYLDFRSLYPSIIITHNVSPDTLNREGCKEYDVAPQVGHRFCKDFPGFIPSLLGDLLEERQKIKKKMKATIDPIERKLLDYRQRAIKILANSYYGYYGYARARWYCKECAESVTAWGREYITMTIKEIEEKYGFKVIYSDTDGFFATIPGADAETVKKKAMEFLKYINAKLPGALELEYEGFYKRGFFVTKKKYAVIDEEGKITTRGLEIVRRDWSEIAKETQARVLEALLKDGDVEKAVRIVKEVTEKLSKYEVPPEKLVIHEQITRDLKDYKATGPHVAVAKRLAARGVKIRPGTVISYIVLKGSGRIGDRAIPFDEFDPTKHKYDAEYYIENQVLPAVERILRAFGYRKEDLRYQKTRQVGLSAWLKPKGT

SEQ ID NO: 3264 - protein, 774 aa, synthetic construct
MILDTDYITEDGKPVWRIFKKENGEFKIEYDRTFEPYFYALLKDDSAIEEVKKITAERHGTVVTVKRVEKVQKKFLGRPVEVWKLYFTHPQDVDAIRDKIREHPAVIDIYEYDIPPAKRYLIIKGLVPMEGDEELKMLAFDIETLYHEGEEFAEGPILMISYADEEGARVITWKNVDLPYVDVVSTEREMIKRFLRVVKEKDPDVLITYNGDNFDFAYLKKRCEKLGINFALGRDGSEPKIQRMGDRFAVEVKGRIHFDLYPVIRRTINLPTYTLEAVYEAVFGQPKEKVYAEEITTAWETGENLERVARYSMEDAKVTYELGKEFLPMEAQLSRLIGQSLWDVSRSSTGNLVEWFLLRKAYERNELAPNKPDEKELARRRQSYEGGYVKEPERGLWENIVYLDFRSLYPSIIITHNVSPDTLNREGCKEYDVAPQVGHRFCKDFPGFIPSLLGDLLEERQKIKKKMKATIDPIERKLLDYRQRAIKILANSYYGYYGYARARWYCKECAESVTAWGREYITMTIKEIEEKYGFKVIYSDTDGFFATIPGADAETVKKKAMEFLKYINAKLPGALELEYEGFYKRGFFVTKKKYAVIDEEGKITTRGLEIVRRDWSEIAKETQARVLEALLKDGDVEKAVRIVKEVTEKLSKYEVPPEKLVIHEQITRDLKDYKATGPHVAVAKRLAARGVKIRPGTVISYIVLKGSGRIGDRAIPFDEFDPTKHKYDAEYYIENQVLPAVERILRAFGYRKEDLRYQKTRQVGLSAWLKPKGT

SEQ ID NO: 3265 - protein, 774 aa, synthetic construct
MILDTDYITEDGKPVWRIFKKENGEFKIEYDRTFEPYFYALLKDDSAIEEVKKITAERHGTVVTVKRVEKVQKKFLGRPVEVWKLYFTHPQDVPAIFDKIREHPAVIDIYEYDIPFMKRYLIDKGLVPMEGDEELKMLAFDIETLYHEGEEFAEGPILMISYADEEGARVITWKNVDLPYVDVVSTEREMIKRFLRVVKEKDPDVLITYNGDNFDFAYLKKRCEKLGINFALGRDGSEPKIQRMGDRFAVEVKGRIHFDLYPVIRRTINLPTYTLEAVYEAVFGQPKEKVYAEEITTAWETGENLERVARYSMEDAKVTYELGKEFLPMEAQLSRLIGQSLWDVSRSSTGNLVEWFLLRKAYERNELAPNKPDEKELARRRQSYEGGYVKEPERGLWENIVYLDFRSLYPSIIITHNVSPDTLNREGCKEYDVAPQVGHRFCKDFPGFIPSLLGDLLEERQKIKKKMKATIDPIERKLLDYRQRAIKILANSYYGYYGYARARWYCKECAESVTAWGREYITMTIKEIEEKYGFKVIYSDTDGFFATIPGADAETVKKKAMEFLKYINAKLPGALELEYEGFYKRGFFVTKKKYAVIDEEGKITTRGLEIVRRDWSEIAKETQARVLEALLKDGDVEKAVRIVKEVTEKLSKYEVPPEKLVIHEQITRDLKDYKATGPHVAVAKRLAARGVKIRPGTVISYIVLKGSGRIGDRAIPFDEFDPTKHKYDAEYYIENQVLPAVERILRAFGYRKEDLRYQKTRQVGLSAWLKPKGT

SEQ ID NO: 3266 - protein, 774 aa, synthetic construct
MILDTDYITEDGKPVWRIFKKENGEFKIEYDRTFEPYFYALLKDDSAIEEVKKITAERHGTVVTVKRVEKVQKKFLGRPVEVWKLYFTHPQDVPAIFDKIREHPAVIDIYEYDIPFAKRYLIIKGLVPMEGDEELKMLAFDIETLYHEGEEFAEGPILMISYADEEGARVITWKNVDLPYVDVVSTEREMIKRFLRVVKEKDPDVLITYNGDNFDFAYLKKRCEKLGINFALGRDGSEPKIQRMGDRFAVEVKGRIHFDLYPVIRRTINLPTYTLEAVYEAVFGQPKEKVYAEEITTAWETGENLERVARYSMEDAKVTYELGKEFLPMEAQLSRLIGQSLWDVSRSSTGNLVEWFLLRKAYERNELAPNKPDEKELARRRQSYEGGYVKEPERGLWENIVYLDFRSLYPSIIITHNVSPDTLNREGCKEYDVAPQVGHRFCKDFPGFIPSLLGDLLEERQKIKKKMKATIDPIERKLLDYRQRAIKILANSYYGYYGYARARWYCKECAESVTAWGREYITMTIKEIEEKYGFKVIYSDTDGFFATIPGADAETVKKKAMEFLKYINAKLPGALELEYEGFYKRGFFVTKKKYAVIDEEGKITTRGLEIVRRDWSEIAKETQARVLEALLKDGDVEKAVRIVKEVTEKLSKYEVPPEKLVIHEQITRDLKDYKATGPHVAVAKRLAARGVKIRPGTVISYIVLKGSGRIGDRAIPFDEFDPTKHKYDAEYYIENQVLPAVERILRAFGYRKEDLRYQKTRQVGLSAWLKPKGT

SEQ ID NO: 3267 - protein, 774 aa, synthetic construct
MILDTDYITEDGKPVWRIFKKENGEFKIEYDRTFEPYFYALLKDDSAIEEVKKITAERHGTVVTVKRVEKVQKKFLGRPVEVWKLYFTHPQDVPAIFDKIREHPAVIDIYEYDIPPAKRYLIDKGLVPMEGDEELKMLAFDIETLYHEGEEFAEGPILMISYADEEGARVITWKNVDLPYVDVVSTEREMIKRFLRVVKEKDPDVLITYNGDNFDFAYLKKRCEKLGINFALGRDGSEPKIQRMGDRFAVEVKGRIHFDLYPVIRRTINLPTYTLEAVYEAVFGQPKEKVYAEEITTAWETGENLERVARYSMEDAKVTYELGKEFLPMEAQLSRLIGQSLWDVSRSSTGNLVEWFLLRKAYERNELAPNKPDEKELARRRQSYEGGYVKEPERGLWENIVYLDFRSLYPSIIITHNVSPDTLNREGCKEYDVAPQVGHRFCKDFPGFIPSLLGDLLEERQKIKKKMKATIDPIERKLLDYRQRAIKILANSYYGYYGYARARWYCKECAESVTAWGREYITMTIKEIEEKYGFKVIYSDTDGFFATIPGADAETVKKKAMEFLKYINAKLPGALELEYEGFYKRGFFVTKKKYAVIDEEGKITTRGLEIVRRDWSEIAKETQARVLEALLKDGDVEKAVRIVKEVTEKLSKYEVPPEKLVIHEQITRDLKDYKATGPHVAVAKRLAARGVKIRPGTVISYIVLKGSGRIGDRAIPFDEFDPTKHKYDAEYYIENQVLPAVERILRAFGYRKEDLRYQKTRQVGLSAWLKPKGT

SEQ ID NO: 3268 - protein, 774 aa, synthetic construct
MILDTDYITEDGKPVWRIFKKENGEFKIEYDRTFEPYFYALLKDDSAIEEVKKITAERHGTVVTVKRVEKVQKKFLGRPVEVWKLYFTHPQDVPAIFDKIREHPAVIDIYEYDIPPMKRYLIDKGLVPMEGDEELKMLAFDIETLYHEGEEFAEGPILMISYADEEGARVITWKNVDLPYVDVVSTEREMIKRFLRVVKEKDPDVLITYNGDNFDFAYLKKRCEKLGINFALGRDGSEPKIQRMGDRFAVEVKGRIHFDLYPVIRRTINLPTYTLEAVYEAVFGQPKEKVYAEEITTAWETGENLERVARYSMEDAKVTYELGKEFLPMEAQLSRLIGQSLWDVSRSSTGNLVEWFLLRKAYERNELAPNKPDEKELARRRQSYEGGYVKEPERGLWENIVYLDFRSLYPSIIITHNVSPDTLNREGCKEYDVAPQVGHRFCKDFPGFIPSLLGDLLEERQKIKKKMKATIDPIERKLLDYRQRAIKILANSYYGYYGYARARWYCKECAESVTAWGREYITMTIKEIEEKYGFKVIYSDTDGFFATIPGADAETVKKKAMEFLKYINAKLPGALELEYEGFYKRGFFVTKKKYAVIDEEGKITTRGLEIVRRDWSEIAKETQARVLEALLKDGDVEKAVRIVKEVTEKLSKYEVPPEKLVIHEQITRDLKDYKATGPHVAVAKRLAARGVKIRPGTVISYIVLKGSGRIGDRAIPFDEFDPTKHKYDAEYYIENQVLPAVERILRAFGYRKEDLRYQKTRQVGLSAWLKPKGT

SEQ ID NO: 3269 - protein, 774 aa, synthetic construct
MILDTDYITEDGKPVWRIFKKENGEFKIEYDRTFEPYFYALLKDDSAIEEVKKITAERHGTVVTVKRVEKVQKKFLGRPVEVWKLYFTHPQDVPAIFDKIREHPAVIDIYEYDIPPMKRYLIIKGLVPMEGDEELKMLAFDIETLYHEGEEFAEGPILMISYADEEGARVITWKNVDLPYVDVVSTEREMIKRFLRVVKEKDPDVLITYNGDNFDFAYLKKRCEKLGINFALGRDGSEPKIQRMGDRFAVEVKGRIHFDLYPVIRRTINLPTYTLEAVYEAVFGQPKEKVYAEEITTAWETGENLERVARYSMEDAKVTYELGKEFLPMEAQLSRLIGQSLWDVSRSSTGNLVEWFLLRKAYERNELAPNKPDEKELARRRQSYEGGYVKEPERGLWENIVYLDFRSLYPSIIITHNVSPDTLNREGCKEYDVAPQVGHRFCKDFPGFIPSLLGDLLEERQKIKKKMKATIDPIERKLLDYRQRAIKILANSYYGYYGYARARWYCKECAESVTAWGREYITMTIKEIEEKYGFKVIYSDTDGFFATIPGADAETVKKKAMEFLKYINAKLPGALELEYEGFYKRGFFVTKKKYAVIDEEGKITTRGLEIVRRDWSEIAKETQARVLEALLKDGDVEKAVRIVKEVTEKLSKYEVPPEKLVIHEQITRDLKDYKATGPHVAVAKRLAARGVKIRPGTVISYIVLKGSGRIGDRAIPFDEFDPTKHKYDAEYYIENQVLPAVERILRAFGYRKEDLRYQKTRQVGLSAWLKPKGT

SEQ ID NO: 3270 - protein, 774 aa, synthetic construct
MILDTDYITEDGKPVWRIFKKENGEFKIEYDRTFEPYFYALLKDDSAIEEVKKITAERHGTVVTVKRVEKVQKKFLGRPVEVWKLYFTHPQDVPAIFDKIREHPAVIDIYEYDIPPAKRYLIIKGLVPMEGDEELKMLAFDIETLYHEGEEFAEGPILMISYADEEGARVITWKNVDLPYVDVVSTEREMIKRFLRVVKEKDPDVLITYNGDNFDFAYLKKRCEKLGINFALGRDGSEPKIQRMGDRFAVEVKGRIHFDLYPVIRRTINLPTYTLEAVYEAVFGQPKEKVYAEEITTAWETGENLERVARYSMEDAKVTYELGKEFLPMEAQLSRLIGQSLWDVSRSSTGNLVEWFLLRKAYERNELAPNKPDEKELARRRQSYEGGYVKEPERGLWENIVYLDFRSLYPSIIITHNVSPDTLNREGCKEYDVAPQVGHRFCKDFPGFIPSLLGDLLEERQKIKKKMKATIDPIERKLLDYRQRAIKILANSYYGYYGYARARWYCKECAESVTAWGREYITMTIKEIEEKYGFKVIYSDTDGFFATIPGADAETVKKKAMEFLKYINAKLPGALELEYEGFYKRGFFVTKKKYAVIDEEGKITTRGLEIVRRDWSEIAKETQARVLEALLKDGDVEKAVRIVKEVTEKLSKYEVPPEKLVIHEQITRDLKDYKATGPHVAVAKRLAARGVKIRPGTVISYIVLKGSGRIGDRAIPFDEFDPTKHKYDAEYYIENQVLPAVERILRAFGYRKEDLRYQKTRQVGLSAWLKPKGT

SEQ ID NO: 3271 - protein, 774 aa, synthetic construct
MILDTDYITEDGKPVWRIFKKENGEFKIEYDRTFEPYFYALLKDDSAIEEVKKITAERHGTVVTVKRVEKVQKKFLGRPVEVWKLYFTHPQDVPAIFDKIREHPAVIDIYEYDIPPAKQYLIIKGLVPMEGDEELKMLAFDIETLYHEGEEFAEGPILMISYADEEGARVITWKNVDLPYVDVVSTEREMIKRFLRVVKEKDPDVLITYNGDNFDFAYLKKRCEKLGINFALGRDGSEPKIQRMGDRFAVEVKGRIHFDLYPVIRRTINLPTYTLEAVYEAVFGQPKEKVYAEEITTAWETGENLERVARYSMEDAKVTYELGKEFLPMEAQLSRLIGQSLWDVSRSSTGNLVEWFLLRKAYERNELAPNKPDEKELARRRQSYEGGYVKEPERGLWENIVYLDFRSLYPSIIITHNVSPDTLNREGCKEYDVAPQVGHRFCKDFPGFIPSLLGDLLEERQKIKKKMKATIDPIERKLLDYRQRAIKILANSYYGYYGYARARWYCKECAESVTAWGREYITMTIKEIEEKYGFKVIYSDTDGFFATIPGADAETVKKKAMEFLKYINAKLPGALELEYEGFYKRGFFVTKKKYAVIDEEGKITTRGLEIVRRDWSEIAKETQARVLEALLKDGDVEKAVRIVKEVTEKLSKYEVPPEKLVIHEQITRDLKDYKATGPHVAVAKRLAARGVKIRPGTVISYIVLKGSGRIGDRAIPFDEFDPTKHKYDAEYYIENQVLPAVERILRAFGYRKEDLRYQKTRQVGLSAWLKPKGT

SEQ ID NO: 3272 - protein, 774 aa, synthetic construct
MILDTDYITEDGKPVWRIFKKENGEFKIEYDRTFEPYFYALLKDDSAIEEVKKITAERHGTVVTVKRVEKVQKKFLGRPVEVWKLYFTHPQDKPAIRDKIREHPAVIDIYEYDIPPAKRYLIDKGLVPMEGDEELKMLAFDIETLYHEGEEFAEGPILMISYADEEGARVITWKNVDLPYVDVVSTEREMIKRFLRVVKEKDPDVLITYNGDNFDFAYLKKRCEKLGINFALGRDGSEPKIQRMGDRFAVEVKGRIHFDLYPVIRRTINLPTYTLEAVYEAVFGQPKEKVYAEEITTAWETGENLERVARYSMEDAKVTYELGKEFLPMEAQLSRLIGQSLWDVSRSSTGNLVEWFLLRKAYERNELAPNKPDEKELARRRQSYEGGYVKEPERGLWENIVYLDFRSLYPSIIITHNVSPDTLNREGCKEYDVAPQVGHRFCKDFPGFIPSLLGDLLEERQKIKKKMKATIDPIERKLLDYRQRAIKILANSYYGYYGYARARWYCKECAESVTAWGREYITMTIKEIEEKYGFKVIYSDTDGFFATIPGADAETVKKKAMEFLKYINAKLPGALELEYEGFYKRGFFVTKKKYAVIDEEGKITTRGLEIVRRDWSEIAKETQARVLEALLKDGDVEKAVRIVKEVTEKLSKYEVPPEKLVIHEQITRDLKDYKATGPHVAVAKRLAARGVKIRPGTVISYIVLKGSGRIGDRAIPFDEFDPTKHKYDAEYYIENQVLPAVERILRAFGYRKEDLRYQKTRQVGLSAWLKPKGT

SEQ ID NO: 3273 - protein, 774 aa, synthetic construct
MILDTDYITEDGKPVWRIFKKENGEFKIEYDRTFEPYFYALLKDDSAIEEVKKITAERHGTVVTVKRVEKVQKKFLGRPVEVWKLYFTHPQDKPAIRDKIREHPAVIDIYEYDIPPMKRYLIDKGLVPMEGDEELKMLAFDIETLYHEGEEFAEGPILMISYADEEGARVITWKNVDLPYVDVVSTEREMIKRFLRVVKEKDPDVLITYNGDNFDFAYLKKRCEKLGINFALGRDGSEPKIQRMGDRFAVEVKGRIHFDLYPVIRRTINLPTYTLEAVYEAVFGQPKEKVYAEEITTAWETGENLERVARYSMEDAKVTYELGKEFLPMEAQLSRLIGQSLWDVSRSSTGNLVEWFLLRKAYERNELAPNKPDEKELARRRQSYEGGYVKEPERGLWENIVYLDFRSLYPSIIITHNVSPDTLNREGCKEYDVAPQVGHRFCKDFPGFIPSLLGDLLEERQKIKKKMKATIDPIERKLLDYRQRAIKILANSYYGYYGYARARWYCKECAESVTAWGREYITMTIKEIEEKYGFKVIYSDTDGFFATIPGADAETVKKKAMEFLKYINAKLPGALELEYEGFYKRGFFVTKKKYAVIDEEGKITTRGLEIVRRDWSEIAKETQARVLEALLKDGDVEKAVRIVKEVTEKLSKYEVPPEKLVIHEQITRDLKDYKATGPHVAVAKRLAARGVKIRPGTVISYIVLKGSGRIGDRAIPFDEFDPTKHKYDAEYYIENQVLPAVERILRAFGYRKEDLRYQKTRQVGLSAWLKPKGT

SEQ ID NO: 3274 - protein, 774 aa, synthetic construct
MILDTDYITEDGKPVWRIFKKENGEFKIEYDRTFEPYFYALLKDDSAIEEVKKITAERHGTVVTVKRVEKVQKKFLGRPVEVWKLYFTHPQDKPAIRDKIREHPAVIDIYEYDIPPMKQYLIDKGLVPMEGDEELKMLAFDIETLYHEGEEFAEGPILMISYADEEGARVITWKNVDLPYVDVVSTEREMIKRFLRVVKEKDPDVLITYNGDNFDFAYLKKRCEKLGINFALGRDGSEPKIQRMGDRFAVEVKGRIHFDLYPVIRRTINLPTYTLEAVYEAVFGQPKEKVYAEEITTAWETGENLERVARYSMEDAKVTYELGKEFLPMEAQLSRLIGQSLWDVSRSSTGNLVEWFLLRKAYERNELAPNKPDEKELARRRQSYEGGYVKEPERGLWENIVYLDFRSLYPSIIITHNVSPDTLNREGCKEYDVAPQVGHRFCKDFPGFIPSLLGDLLEERQKIKKKMKATIDPIERKLLDYRQRAIKILANSYYGYYGYARARWYCKECAESVTAWGREYITMTIKEIEEKYGFKVIYSDTDGFFATIPGADAETVKKKAMEFLKYINAKLPGALELEYEGFYKRGFFVTKKKYAVIDEEGKITTRGLEIVRRDWSEIAKETQARVLEALLKDGDVEKAVRIVKEVTEKLSKYEVPPEKLVIHEQITRDLKDYKATGPHVAVAKRLAARGVKIRPGTVISYIVLKGSGRIGDRAIPFDEFDPTKHKYDAEYYIENQVLPAVERILRAFGYRKEDLRYQKTRQVGLSAWLKPKGT

SEQ ID NO: 3275 - protein, 774 aa, synthetic construct
MILDTDYITEDGKPVWRIFKKENGEFKIEYDRTFEPYFYALLKDDSAIEEVKKITAERHGTVVTVKRVEKVQKKFLGRPVEVWKLYFTHPQDKPAIRDKIREHPAVIDIYEYDIPPAKQYLIDKGLVPMEGDEELKMLAFDIETLYHEGEEFAEGPILMISYADEEGARVITWKNVDLPYVDVVSTEREMIKRFLRVVKEKDPDVLITYNGDNFDFAYLKKRCEKLGINFALGRDGSEPKIQRMGDRFAVEVKGRIHFDLYPVIRRTINLPTYTLEAVYEAVFGQPKEKVYAEEITTAWETGENLERVARYSMEDAKVTYELGKEFLPMEAQLSRLIGQSLWDVSRSSTGNLVEWFLLRKAYERNELAPNKPDEKELARRRQSYEGGYVKEPERGLWENIVYLDFRSLYPSIIITHNVSPDTLNREGCKEYDVAPQVGHRFCKDFPGFIPSLLGDLLEERQKIKKKMKATIDPIERKLLDYRQRAIKILANSYYGYYGYARARWYCKECAESVTAWGREYITMTIKEIEEKYGFKVIYSDTDGFFATIPGADAETVKKKAMEFLKYINAKLPGALELEYEGFYKRGFFVTKKKYAVIDEEGKITTRGLEIVRRDWSEIAKETQARVLEALLKDGDVEKAVRIVKEVTEKLSKYEVPPEKLVIHEQITRDLKDYKATGPHVAVAKRLAARGVKIRPGTVISYIVLKGSGRIGDRAIPFDEFDPTKHKYDAEYYIENQVLPAVERILRAFGYRKEDLRYQKTRQVGLSAWLKPKGT

SEQ ID NO: 3276 - protein, 774 aa, synthetic construct
MILDTDYITEDGKPVWRIFKKENGEFKIEYDRTFEPYFYALLKDDSAIEEVKKITAERHGTVVTVKRVEKVQKKFLGRPVEVWKLYFTHPQDKPAIRDKIREHPAVIDIYEYDIPPAKQYLIIKGLVPMEGDEELKMLAFDIETLYHEGEEFAEGPILMISYADEEGARVITWKNVDLPYVDVVSTEREMIKRFLRVVKEKDPDVLITYNGDNFDFAYLKKRCEKLGINFALGRDGSEPKIQRMGDRFAVEVKGRIHFDLYPVIRRTINLPTYTLEAVYEAVFGQPKEKVYAEEITTAWETGENLERVARYSMEDAKVTYELGKEFLPMEAQLSRLIGQSLWDVSRSSTGNLVEWFLLRKAYERNELAPNKPDEKELARRRQSYEGGYVKEPERGLWENIVYLDFRSLYPSIIITHNVSPDTLNREGCKEYDVAPQVGHRFCKDFPGFIPSLLGDLLEERQKIKKKMKATIDPIERKLLDYRQRAIKILANSYYGYYGYARARWYCKECAESVTAWGREYITMTIKEIEEKYGFKVIYSDTDGFFATIPGADAETVKKKAMEFLKYINAKLPGALELEYEGFYKRGFFVTKKKYAVIDEEGKITTRGLEIVRRDWSEIAKETQARVLEALLKDGDVEKAVRIVKEVTEKLSKYEVPPEKLVIHEQITRDLKDYKATGPHVAVAKRLAARGVKIRPGTVISYIVLKGSGRIGDRAIPFDEFDPTKHKYDAEYYIENQVLPAVERILRAFGYRKEDLRYQKTRQVGLSAWLKPKGT

SEQ ID NO: 3277 - protein, 774 aa, synthetic construct
MILDTDYITEDGKPVWRIFKKENGEFKIEYDRTFEPYFYALLKDDSAIEEVKKITAERHGTVVTVKRVEKVQKKFLGRPVEVWKLYFTHPQDKDAIRDKIREHPAVIDIYEYDIPPAKRYLIDKGLVPMEGDEELKMLAFDIETLYHEGEEFAEGPILMISYADEEGARVITWKNVDLPYVDVVSTEREMIKRFLRVVKEKDPDVLITYNGDNFDFAYLKKRCEKLGINFALGRDGSEPKIQRMGDRFAVEVKGRIHFDLYPVIRRTINLPTYTLEAVYEAVFGQPKEKVYAEEITTAWETGENLERVARYSMEDAKVTYELGKEFLPMEAQLSRLIGQSLWDVSRSSTGNLVEWFLLRKAYERNELAPNKPDEKELARRRQSYEGGYVKEPERGLWENIVYLDFRSLYPSIIITHNVSPDTLNREGCKEYDVAPQVGHRFCKDFPGFIPSLLGDLLEERQKIKKKMKATIDPIERKLLDYRQRAIKILANSYYGYYGYARARWYCKECAESVTAWGREYITMTIKEIEEKYGFKVIYSDTDGFFATIPGADAETVKKKAMEFLKYINAKLPGALELEYEGFYKRGFFVTKKKYAVIDEEGKITTRGLEIVRRDWSEIAKETQARVLEALLKDGDVEKAVRIVKEVTEKLSKYEVPPEKLVIHEQITRDLKDYKATGPHVAVAKRLAARGVKIRPGTVISYIVLKGSGRIGDRAIPFDEFDPTKHKYDAEYYIENQVLPAVERILRAFGYRKEDLRYQKTRQVGLSAWLKPKGT

SEQ ID NO: 3278 - protein, 774 aa, synthetic construct
MILDTDYITEDGKPVWRIFKKENGEFKIEYDRTFEPYFYALLKDDSAIEEVKKITAERHGTVVTVKRVEKVQKKFLGRPVEVWKLYFTHPQDKDAIFDKIREHPAVIDIYEYDIPPAKRYLIDKGLVPMEGDEELKMLAFDIETLYHEGEEFAEGPILMISYADEEGARVITWKNVDLPYVDVVSTEREMIKRFLRVVKEKDPDVLITYNGDNFDFAYLKKRCEKLGINFALGRDGSEPKIQRMGDRFAVEVKGRIHFDLYPVIRRTINLPTYTLEAVYEAVFGQPKEKVYAEEITTAWETGENLERVARYSMEDAKVTYELGKEFLPMEAQLSRLIGQSLWDVSRSSTGNLVEWFLLRKAYERNELAPNKPDEKELARRRQSYEGGYVKEPERGLWENIVYLDFRSLYPSIIITHNVSPDTLNREGCKEYDVAPQVGHRFCKDFPGFIPSLLGDLLEERQKIKKKMKATIDPIERKLLDYRQRAIKILANSYYGYYGYARARWYCKECAESVTAWGREYITMTIKEIEEKYGFKVIYSDTDGFFATIPGADAETVKKKAMEFLKYINAKLPGALELEYEGFYKRGFFVTKKKYAVIDEEGKITTRGLEIVRRDWSEIAKETQARVLEALLKDGDVEKAVRIVKEVTEKLSKYEVPPEKLVIHEQITRDLKDYKATGPHVAVAKRLAARGVKIRPGTVISYIVLKGSGRIGDRAIPFDEFDPTKHKYDAEYYIENQVLPAVERILRAFGYRKEDLRYQKTRQVGLSAWLKPKGT

SEQ ID NO: 3279 - protein, 774 aa, synthetic construct
MILDTDYITEDGKPVWRIFKKENGEFKIEYDRTFEPYFYALLKDDSAIEEVKKITAERHGTVVTVKRVEKVQKKFLGRPVEVWKLYFTHPQDKPAIFDKIREHPAVIDIYEYDIPPAKRYLIDKGLVPMEGDEELKMLAFDIETLYHEGEEFAEGPILMISYADEEGARVITWKNVDLPYVDVVSTEREMIKRFLRVVKEKDPDVLITYNGDNFDFAYLKKRCEKLGINFALGRDGSEPKIQRMGDRFAVEVKGRIHFDLYPVIRRTINLPTYTLEAVYEAVFGQPKEKVYAEEITTAWETGENLERVARYSMEDAKVTYELGKEFLPMEAQLSRLIGQSLWDVSRSSTGNLVEWFLLRKAYERNELAPNKPDEKELARRRQSYEGGYVKEPERGLWENIVYLDFRSLYPSIIITHNVSPDTLNREGCKEYDVAPQVGHRFCKDFPGFIPSLLGDLLEERQKIKKKMKATIDPIERKLLDYRQRAIKILANSYYGYYGYARARWYCKECAESVTAWGREYITMTIKEIEEKYGFKVIYSDTDGFFATIPGADAETVKKKAMEFLKYINAKLPGALELEYEGFYKRGFFVTKKKYAVIDEEGKITTRGLEIVRRDWSEIAKETQARVLEALLKDGDVEKAVRIVKEVTEKLSKYEVPPEKLVIHEQITRDLKDYKATGPHVAVAKRLAARGVKIRPGTVISYIVLKGSGRIGDRAIPFDEFDPTKHKYDAEYYIENQVLPAVERILRAFGYRKEDLRYQKTRQVGLSAWLKPKGT

SEQ ID NO: 3280 - protein, 774 aa, synthetic construct
MILDTDYITEDGKPVWRIFKKENGEFKIEYDRTFEPYFYALLKDDSAIEEVKKITAERHGTVVTVKRVEKVQKKFLGRPVEVWKLYFTHPQDKPAIFDKIREHPAVIDIYEYDIPPMKRYLIDKGLVPMEGDEELKMLAFDIETLYHEGEEFAEGPILMISYADEEGARVITWKNVDLPYVDVVSTEREMIKRFLRVVKEKDPDVLITYNGDNFDFAYLKKRCEKLGINFALGRDGSEPKIQRMGDRFAVEVKGRIHFDLYPVIRRTINLPTYTLEAVYEAVFGQPKEKVYAEEITTAWETGENLERVARYSMEDAKVTYELGKEFLPMEAQLSRLIGQSLWDVSRSSTGNLVEWFLLRKAYERNELAPNKPDEKELARRRQSYEGGYVKEPERGLWENIVYLDFRSLYPSIIITHNVSPDTLNREGCKEYDVAPQVGHRFCKDFPGFIPSLLGDLLEERQKIKKKMKATIDPIERKLLDYRQRAIKILANSYYGYYGYARARWYCKECAESVTAWGREYITMTIKEIEEKYGFKVIYSDTDGFFATIPGADAETVKKKAMEFLKYINAKLPGALELEYEGFYKRGFFVTKKKYAVIDEEGKITTRGLEIVRRDWSEIAKETQARVLEALLKDGDVEKAVRIVKEVTEKLSKYEVPPEKLVIHEQITRDLKDYKATGPHVAVAKRLAARGVKIRPGTVISYIVLKGSGRIGDRAIPFDEFDPTKHKYDAEYYIENQVLPAVERILRAFGYRKEDLRYQKTRQVGLSAWLKPKGT

SEQ ID NO: 3281 - protein, 774 aa, synthetic construct
MILDTDYITEDGKPVWRIFKKENGEFKIEYDRTFEPYFYALLKDDSAIEEVKKITAERHGTVVTVKRVEKVQKKFLGRPVEVWKLYFTHPQDKPAIFDKIREHPAVIDIYEYDIPPAKQYLIDKGLVPMEGDEELKMLAFDIETLYHEGEEFAEGPILMISYADEEGARVITWKNVDLPYVDVVSTEREMIKRFLRVVKEKDPDVLITYNGDNFDFAYLKKRCEKLGINFALGRDGSEPKIQRMGDRFAVEVKGRIHFDLYPVIRRTINLPTYTLEAVYEAVFGQPKEKVYAEEITTAWETGENLERVARYSMEDAKVTYELGKEFLPMEAQLSRLIGQSLWDVSRSSTGNLVEWFLLRKAYERNELAPNKPDEKELARRRQSYEGGYVKEPERGLWENIVYLDFRSLYPSIIITHNVSPDTLNREGCKEYDVAPQVGHRFCKDFPGFIPSLLGDLLEERQKIKKKMKATIDPIERKLLDYRQRAIKILANSYYGYYGYARARWYCKECAESVTAWGREYITMTIKEIEEKYGFKVIYSDTDGFFATIPGADAETVKKKAMEFLKYINAKLPGALELEYEGFYKRGFFVTKKKYAVIDEEGKITTRGLEIVRRDWSEIAKETQARVLEALLKDGDVEKAVRIVKEVTEKLSKYEVPPEKLVIHEQITRDLKDYKATGPHVAVAKRLAARGVKIRPGTVISYIVLKGSGRIGDRAIPFDEFDPTKHKYDAEYYIENQVLPAVERILRAFGYRKEDLRYQKTRQVGLSAWLKPKGT

SEQ ID NO: 3282 - protein, 774 aa, synthetic construct
MILDTDYITEDGKPVWRIFKKENGEFKIEYDRTFEPDFYALLKDDSAIEEVKKITAERHGTVVTVKRVEKVQKKFLGRPVEVWKLYFTHPQDVPAIRDKIREHPAVIDIYEYDIPPAKRYLIIKGLVPMEGDEELKMLAFDIETLYHEGEEFAEGPILMISYADEEGARVITWKNVDLPYVDVVSTEREMIKRFLRVVKEKDPDVLITYNGDNFDFAYLKKRCEKLGINFALGRDGSEPKIQRMGDRFAVEVKGRIHFDLYPVIRRTINLPTYTLEAVYEAVFGQPKEKVYAEEITTAWETGENLERVARYSMEDAKVTYELGKEFLPMEAQLSRLIGQSLWDVSRSSTGNLVEWFLLRKAYERNELAPNKPDEKELARRRQSYEGGYVKEPERGLWENIVYLDFRSLYPSIIITHNVSPDTLNREGCKEYDVAPQVGHRFCKDFPGFIPSLLGDLLEERQKIKKKMKATIDPIERKLLDYRQRAIKILANSYYGYYGYARARWYCKECAESVTAWGREYITMTIKEIEEKYGFKVIYSDTDGFFATIPGADAETVKKKAMEFLKYINAKLPGALELEYEGFYKRGFFVTKKKYAVIDEEGKITTRGLEIVRRDWSEIAKETQARVLEALLKDGDVEKAVRIVKEVTEKLSKYEVPPEKLVIHEQITRDLKDYKATGPHVAVAKRLAARGVKIRPGTVISYIVLKGSGRIGDRAIPFDEFDPTKHKYDAEYYIENQVLPAVERILRAFGYRKEDLRYQKTRQVGLSAWLKPKGT

SEQ ID NO: 3283 - protein, 774 aa, synthetic construct
MILDTDYITEDGKEVWRIFKKENGEFKIEYDRTFEPYFYALLKDDSAIEEVKKITAERHGTVVTVKRVEKVQKKFLGRPVEVWKLYFTHFQDVPAIRDKIREHPAVIDIYEYDIPPAKRYLIDKGLVPMEGDEELKMLAFDIETLYHEGEEFAEGPILMISYADEEGARVITWKNVDLPYVDVVSTEREMIKRFLRVVKEKDPDVLITYNGDNFDFAYLKKRCEKLGINFALGRDGSEPKIQRMGDRFAVEVKGRIHFDLYPVIRRTINLPTYTLEAVYEAVFGQPKEKVYAEEITTAWETGENLERVARYSMEDAKVTYELGKEFLPMEAQLSRLIGQSLWDVSRSSTGNLVEWFLLRKAYERNELAPNKPDEKELARRRQSYEGGYVKEPERGLWENIVYLDFRSLYPSIIITHNVSPDTLNREGCKEYDVAPQVGHRFCKDFPGFIPSLLGDLLEERQKIKKKMKATIDPIERKLLDYRQRAIKILANSYYGYYGYARARWYCKECAESVTAWGREYITMTIKEIEEKYGFKVIYSDTDGFFATIPGADAETVKKKAMEFLKYINAKLPGALELEYEGFYKRGFFVTKKKYAVIDEEGKITTRGLEIVRRDWSEIAKETQARVLEALLKDGDVEKAVRIVKEVTEKLSKYEVPPEKLVIHEQITRDLKDYKATGPHVAVAKRLAARGVKIRPGTVISYIVLKGSGRIGDRAIPFDEFDPTKHKYDAEYYIENQVLPAVERILRAFGYRKEDLRYQKTRQVGLSAWLKPKGT

SEQ ID NO: 3284 - protein, 774 aa, synthetic construct
MILDTDYITEDGKEVIRIFKKENGEFKIEYDRTFEHYFYALLKDDSAIEEVKKITAERHGTVVTVKRVEKVQKKFLGRPVEVWKLYFTHPQDVPAIRDKIREHPAVIDIYEYDIPFAKRYLIDKGLVPMEGDEELKMLAFDIETLYHEGEEFAEGPILMISYADEEGARVITWKNVDLPYVDVVSTEREMIKRFLRVVKEKDPDVLITYNGDNFDFAYLKKRCEKLGINFALGRDGSEPKIQRMGDRFAVEVKGRIHFDLYPVIRRTINLPTYTLEAVYEAVFGQPKEKVYAEEITTAWETGENLERVARYSMEDAKVTYELGKEFLPMEAQLSRLIGQSLWDVSRSSTGNLVEWFLLRKAYERNELAPNKPDEKELARRRQSYEGGYVKEPERGLWENIVYLDFRSLYPSIIITHNVSPDTLNREGCKEYDVAPQVGHRFCKDFPGFIPSLLGDLLEERQKIKKKMKATIDPIERKLLDYRQRAIKILANSYYGYYGYARARWYCKECAESVTAWGREYITMTIKEIEEKYGFKVIYSDTDGFFATIPGADAETVKKKAMEFLKYINAKLPGALELEYEGFYKRGFFVTKKKYAVIDEEGKITTRGLEIVRRDWSEIAKETQARVLEALLKDGDVEKAVRIVKEVTEKLSKYEVPPEKLVIHEQITRDLKDYKATGPHVAVAKRLAARGVKIRPGTVISYIVLKGSGRIGDRAIPFDEFDPTKHKYDAEYYIENQVLPAVERILRAFGYRKEDLRYQKTRQVGLSAWLKPKGT

SEQ ID NO: 3285 - protein, 774 aa, synthetic construct
MILDTDYITEDGKEVIRIFKKENGEFKIEYDRTFEHYFYALLKDDSAIEEVKKITAERHGTVVTVKRVEKVQKKFLGRPVEVWKLYFTHFQDVPAIRDKIREHPAVIDIYEYDIPPMKRYLIDKGLVPMEGDEELKMLAFDIETLYHEGEEFAEGPILMISYADEEGARVITWKNVDLPYVDVVSTEREMIKRFLRVVKEKDPDVLITYNGDNFDFAYLKKRCEKLGINFALGRDGSEPKIQRMGDRFAVEVKGRIHFDLYPVIRRTINLPTYTLEAVYEAVFGQPKEKVYAEEITTAWETGENLERVARYSMEDAKVTYELGKEFLPMEAQLSRLIGQSLWDVSRSSTGNLVEWFLLRKAYERNELAPNKPDEKELARRRQSYEGGYVKEPERGLWENIVYLDFRSLYPSIIITHNVSPDTLNREGCKEYDVAPQVGHRFCKDFPGFIPSLLGDLLEERQKIKKKMKATIDPIERKLLDYRQRAIKILANSYYGYYGYARARWYCKECAESVTAWGREYITMTIKEIEEKYGFKVIYSDTDGFFATIPGADAETVKKKAMEFLKYINAKLPGALELEYEGFYKRGFFVTKKKYAVIDEEGKITTRGLEIVRRDWSEIAKETQARVLEALLKDGDVEKAVRIVKEVTEKLSKYEVPPEKLVIHEQITRDLKDYKATGPHVAVAKRLAARGVKIRPGTVISYIVLKGSGRIGDRAIPFDEFDPTKHKYDAEYYIENQVLPAVERILRAFGYRKEDLRYQKTRQVGLSAWLKPKGT

SEQ ID NO: 3286 - protein, 774 aa, synthetic construct
MILDTDYITEDGKEVIRIFKKENGEFKIEYDRTFEPYFYALLKDDSAIEEVKKITAERHGTVVTVKRVEKVQKKFLGRPVEVWKLYFTHFQDVPAIRDKIREHPAVIDIYEYDIPFAKRYLIDKGLVPMEGDEELKMLAFDIETLYHEGEEFAEGPILMISYADEEGARVITWKNVDLPYVDVVSTEREMIKRFLRVVKEKDPDVLITYNGDNFDFAYLKKRCEKLGINFALGRDGSEPKIQRMGDRFAVEVKGRIHFDLYPVIRRTINLPTYTLEAVYEAVFGQPKEKVYAEEITTAWETGENLERVARYSMEDAKVTYELGKEFLPMEAQLSRLIGQSLWDVSRSSTGNLVEWFLLRKAYERNELAPNKPDEKELARRRQSYEGGYVKEPERGLWENIVYLDFRSLYPSIIITHNVSPDTLNREGCKEYDVAPQVGHRFCKDFPGFIPSLLGDLLEERQKIKKKMKATIDPIERKLLDYRQRAIKILANSYYGYYGYARARWYCKECAESVTAWGREYITMTIKEIEEKYGFKVIYSDTDGFFATIPGADAETVKKKAMEFLKYINAKLPGALELEYEGFYKRGFFVTKKKYAVIDEEGKITTRGLEIVRRDWSEIAKETQARVLEALLKDGDVEKAVRIVKEVTEKLSKYEVPPEKLVIHEQITRDLKDYKATGPHVAVAKRLAARGVKIRPGTVISYIVLKGSGRIGDRAIPFDEFDPTKHKYDAEYYIENQVLPAVERILRAFGYRKEDLRYQKTRQVGLSAWLKPKGT

SEQ ID NO: 3287 - protein, 774 aa, synthetic construct
MILDTDYITEDGKEVIRIFKKENGEFKIEYDRTFEPYFYALLKDDSAIEEVKKITAERHGTVVTVKRVEKVQKKFLGRPVEVWKLYFTHFQDVPAIRDKIREHPAVIDIYEYDIPFMKRYLIDKGLVPMEGDEELKMLAFDIETLYHEGEEFAEGPILMISYADEEGARVITWKNVDLPYVDVVSTEREMIKRFLRVVKEKDPDVLITYNGDNFDFAYLKKRCEKLGINFALGRDGSEPKIQRMGDRFAVEVKGRIHFDLYPVIRRTINLPTYTLEAVYEAVFGQPKEKVYAEEITTAWETGENLERVARYSMEDAKVTYELGKEFLPMEAQLSRLIGQSLWDVSRSSTGNLVEWFLLRKAYERNELAPNKPDEKELARRRQSYEGGYVKEPERGLWENIVYLDFRSLYPSIIITHNVSPDTLNREGCKEYDVAPQVGHRFCKDFPGFIPSLLGDLLEERQKIKKKMKATIDPIERKLLDYRQRAIKILANSYYGYYGYARARWYCKECAESVTAWGREYITMTIKEIEEKYGFKVIYSDTDGFFATIPGADAETVKKKAMEFLKYINAKLPGALELEYEGFYKRGFFVTKKKYAVIDEEGKITTRGLEIVRRDWSEIAKETQARVLEALLKDGDVEKAVRIVKEVTEKLSKYEVPPEKLVIHEQITRDLKDYKATGPHVAVAKRLAARGVKIRPGTVISYIVLKGSGRIGDRAIPFDEFDPTKHKYDAEYYIENQVLPAVERILRAFGYRKEDLRYQKTRQVGLSAWLKPKGT

SEQ ID NO: 3288 - protein, 774 aa, synthetic construct
MILDTDYITEDGKEVIRIFKKENGEFKIEYDRTFEPYFYALLKDDSAIEEVKKITAERHGTVVTVKRVEKVQKKFLGRPVEVWKLYFTHFQDVPAIRDKIREHPAVIDIYEYDIPPAKRYLIDKGLVPMEGDEELKMLAFDIETLYHEGEEFAEGPILMISYADEEGARVITWKNVDLPYVDVVSTEREMIKRFLRVVKEKDPDVLITYNGDNFDFAYLKKRCEKLGINFALGRDGSEPKIQRMGDRFAVEVKGRIHFDLYPVIRRTINLPTYTLEAVYEAVFGQPKEKVYAEEITTAWETGENLERVARYSMEDAKVTYELGKEFLPMEAQLSRLIGQSLWDVSRSSTGNLVEWFLLRKAYERNELAPNKPDEKELARRRQSYEGGYVKEPERGLWENIVYLDFRSLYPSIIITHNVSPDTLNREGCKEYDVAPQVGHRFCKDFPGFIPSLLGDLLEERQKIKKKMKATIDPIERKLLDYRQRAIKILANSYYGYYGYARARWYCKECAESVTAWGREYITMTIKEIEEKYGFKVIYSDTDGFFATIPGADAETVKKKAMEFLKYINAKLPGALELEYEGFYKRGFFVTKKKYAVIDEEGKITTRGLEIVRRDWSEIAKETQARVLEALLKDGDVEKAVRIVKEVTEKLSKYEVPPEKLVIHEQITRDLKDYKATGPHVAVAKRLAARGVKIRPGTVISYIVLKGSGRIGDRAIPFDEFDPTKHKYDAEYYIENQVLPAVERILRAFGYRKEDLRYQKTRQVGLSAWLKPKGT

SEQ ID NO: 3289 - protein, 774 aa, synthetic construct
MILDTDYITEDGKEVIRIFKKENGEFKIEYDRTFEPYFYALLKDDSAIEEVKKITAERHGTVVTVKRVEKVQKKFLGRPVEVWKLYFTHFQDVPAIRDKIREHPAVIDIYEYDIPPMKRYLIDKGLVPMEGDEELKMLAFDIETLYHEGEEFAEGPILMISYADEEGARVITWKNVDLPYVDVVSTEREMIKRFLRVVKEKDPDVLITYNGDNFDFAYLKKRCEKLGINFALGRDGSEPKIQRMGDRFAVEVKGRIHFDLYPVIRRTINLPTYTLEAVYEAVFGQPKEKVYAEEITTAWETGENLERVARYSMEDAKVTYELGKEFLPMEAQLSRLIGQSLWDVSRSSTGNLVEWFLLRKAYERNELAPNKPDEKELARRRQSYEGGYVKEPERGLWENIVYLDFRSLYPSIIITHNVSPDTLNREGCKEYDVAPQVGHRFCKDFPGFIPSLLGDLLEERQKIKKKMKATIDPIERKLLDYRQRAIKILANSYYGYYGYARARWYCKECAESVTAWGREYITMTIKEIEEKYGFKVIYSDTDGFFATIPGADAETVKKKAMEFLKYINAKLPGALELEYEGFYKRGFFVTKKKYAVIDEEGKITTRGLEIVRRDWSEIAKETQARVLEALLKDGDVEKAVRIVKEVTEKLSKYEVPPEKLVIHEQITRDLKDYKATGPHVAVAKRLAARGVKIRPGTVISYIVLKGSGRIGDRAIPFDEFDPTKHKYDAEYYIENQVLPAVERILRAFGYRKEDLRYQKTRQVGLSAWLKPKGT

SEQ ID NO: 3290 - protein, 774 aa, synthetic construct
MILDTDYITEDGKEVIRIFKKENGEFKIEYDRTFEPYFYALLKDDSAIEEVKKITAERHGTVVTVKRVEKVQKKFLGRPVEVWKLYFTHFQDVPAIRDKIREHPAVIDIYEYDIPPMKRYLIIKGLVPMEGDEELKMLAFDIETLYHEGEEFAEGPILMISYADEEGARVITWKNVDLPYVDVVSTEREMIKRFLRVVKEKDPDVLITYNGDNFDFAYLKKRCEKLGINFALGRDGSEPKIQRMGDRFAVEVKGRIHFDLYPVIRRTINLPTYTLEAVYEAVFGQPKEKVYAEEITTAWETGENLERVARYSMEDAKVTYELGKEFLPMEAQLSRLIGQSLWDVSRSSTGNLVEWFLLRKAYERNELAPNKPDEKELARRRQSYEGGYVKEPERGLWENIVYLDFRSLYPSIIITHNVSPDTLNREGCKEYDVAPQVGHRFCKDFPGFIPSLLGDLLEERQKIKKKMKATIDPIERKLLDYRQRAIKILANSYYGYYGYARARWYCKECAESVTAWGREYITMTIKEIEEKYGFKVIYSDTDGFFATIPGADAETVKKKAMEFLKYINAKLPGALELEYEGFYKRGFFVTKKKYAVIDEEGKITTRGLEIVRRDWSEIAKETQARVLEALLKDGDVEKAVRIVKEVTEKLSKYEVPPEKLVIHEQITRDLKDYKATGPHVAVAKRLAARGVKIRPGTVISYIVLKGSGRIGDRAIPFDEFDPTKHKYDAEYYIENQVLPAVERILRAFGYRKEDLRYQKTRQVGLSAWLKPKGT

SEQ ID NO: 3291 - protein, 774 aa, synthetic construct
MILDTDYITEDGKPVIRIFKKENGEFKIEYDRTFEHYFYALLKDDSAIEEVKKITAERHGTVVTVKRVEKVQKKFLGRPVEVWKLYFTHPQDVPAIRDKIREHPAVIDIYEYDIPFMKRYLIDKGLVPMEGDEELKMLAFDIETLYHEGEEFAEGPILMISYADEEGARVITWKNVDLPYVDVVSTEREMIKRFLRVVKEKDPDVLITYNGDNFDFAYLKKRCEKLGINFALGRDGSEPKIQRMGDRFAVEVKGRIHFDLYPVIRRTINLPTYTLEAVYEAVFGQPKEKVYAEEITTAWETGENLERVARYSMEDAKVTYELGKEFLPMEAQLSRLIGQSLWDVSRSSTGNLVEWFLLRKAYERNELAPNKPDEKELARRRQSYEGGYVKEPERGLWENIVYLDFRSLYPSIIITHNVSPDTLNREGCKEYDVAPQVGHRFCKDFPGFIPSLLGDLLEERQKIKKKMKATIDPIERKLLDYRQRAIKILANSYYGYYGYARARWYCKECAESVTAWGREYITMTIKEIEEKYGFKVIYSDTDGFFATIPGADAETVKKKAMEFLKYINAKLPGALELEYEGFYKRGFFVTKKKYAVIDEEGKITTRGLEIVRRDWSEIAKETQARVLEALLKDGDVEKAVRIVKEVTEKLSKYEVPPEKLVIHEQITRDLKDYKATGPHVAVAKRLAARGVKIRPGTVISYIVLKGSGRIGDRAIPFDEFDPTKHKYDAEYYIENQVLPAVERILRAFGYRKEDLRYQKTRQVGLSAWLKPKGT

SEQ ID NO: 3292 - protein, 774 aa, synthetic construct
MILDTDYITEDGKPVIRIFKKENGEFKIEYDRTFEHYFYALLKDDSAIEEVKKITAERHGTVVTVKRVEKVQKKFLGRPVEVWKLYFTHPQDVPAIRDKIREHPAVIDIYEYDIPFMKRYLIIKGLVPMEGDEELKMLAFDIETLYHEGEEFAEGPILMISYADEEGARVITWKNVDLPYVDVVSTEREMIKRFLRVVKEKDPDVLITYNGDNFDFAYLKKRCEKLGINFALGRDGSEPKIQRMGDRFAVEVKGRIHFDLYPVIRRTINLPTYTLEAVYEAVFGQPKEKVYAEEITTAWETGENLERVARYSMEDAKVTYELGKEFLPMEAQLSRLIGQSLWDVSRSSTGNLVEWFLLRKAYERNELAPNKPDEKELARRRQSYEGGYVKEPERGLWENIVYLDFRSLYPSIIITHNVSPDTLNREGCKEYDVAPQVGHRFCKDFPGFIPSLLGDLLEERQKIKKKMKATIDPIERKLLDYRQRAIKILANSYYGYYGYARARWYCKECAESVTAWGREYITMTIKEIEEKYGFKVIYSDTDGFFATIPGADAETVKKKAMEFLKYINAKLPGALELEYEGFYKRGFFVTKKKYAVIDEEGKITTRGLEIVRRDWSEIAKETQARVLEALLKDGDVEKAVRIVKEVTEKLSKYEVPPEKLVIHEQITRDLKDYKATGPHVAVAKRLAARGVKIRPGTVISYIVLKGSGRIGDRAIPFDEFDPTKHKYDAEYYIENQVLPAVERILRAFGYRKEDLRYQKTRQVGLSAWLKPKGT

SEQ ID NO: 3293 - protein, 774 aa, synthetic construct
MILDTDYITEDGKPVIRIFKKENGEFKIEYDRTFEHYFYALLKDDSAIEEVKKITAERHGTVVTVKRVEKVQKKFLGRPVEVWKLYFTHPQDVPAIRDKIREHPAVIDIYEYDIPFAKRYLIIKGLVPMEGDEELKMLAFDIETLYHEGEEFAEGPILMISYADEEGARVITWKNVDLPYVDVVSTEREMIKRFLRVVKEKDPDVLITYNGDNFDFAYLKKRCEKLGINFALGRDGSEPKIQRMGDRFAVEVKGRIHFDLYPVIRRTINLPTYTLEAVYEAVFGQPKEKVYAEEITTAWETGENLERVARYSMEDAKVTYELGKEFLPMEAQLSRLIGQSLWDVSRSSTGNLVEWFLLRKAYERNELAPNKPDEKELARRRQSYEGGYVKEPERGLWENIVYLDFRSLYPSIIITHNVSPDTLNREGCKEYDVAPQVGHRFCKDFPGFIPSLLGDLLEERQKIKKKMKATIDPIERKLLDYRQRAIKILANSYYGYYGYARARWYCKECAESVTAWGREYITMTIKEIEEKYGFKVIYSDTDGFFATIPGADAETVKKKAMEFLKYINAKLPGALELEYEGFYKRGFFVTKKKYAVIDEEGKITTRGLEIVRRDWSEIAKETQARVLEALLKDGDVEKAVRIVKEVTEKLSKYEVPPEKLVIHEQITRDLKDYKATGPHVAVAKRLAARGVKIRPGTVISYIVLKGSGRIGDRAIPFDEFDPTKHKYDAEYYIENQVLPAVERILRAFGYRKEDLRYQKTRQVGLSAWLKPKGT

SEQ ID NO: 3294 - protein, 774 aa, synthetic construct
MILDTDYITEDGKPVIRIFKKENGEFKIEYDRTFEHYFYALLKDDSAIEEVKKITAERHGTVVTVKRVEKVQKKFLGRPVEVWKLYFTHPQDVPAIRDKIREHPAVIDIYEYDIPPAKRYLIDKGLVPMEGDEELKMLAFDIETLYHEGEEFAEGPILMISYADEEGARVITWKNVDLPYVDVVSTEREMIKRFLRVVKEKDPDVLITYNGDNFDFAYLKKRCEKLGINFALGRDGSEPKIQRMGDRFAVEVKGRIHFDLYPVIRRTINLPTYTLEAVYEAVFGQPKEKVYAEEITTAWETGENLERVARYSMEDAKVTYELGKEFLPMEAQLSRLIGQSLWDVSRSSTGNLVEWFLLRKAYERNELAPNKPDEKELARRRQSYEGGYVKEPERGLWENIVYLDFRSLYPSIIITHNVSPDTLNREGCKEYDVAPQVGHRFCKDFPGFIPSLLGDLLEERQKIKKKMKATIDPIERKLLDYRQRAIKILANSYYGYYGYARARWYCKECAESVTAWGREYITMTIKEIEEKYGFKVIYSDTDGFFATIPGADAETVKKKAMEFLKYINAKLPGALELEYEGFYKRGFFVTKKKYAVIDEEGKITTRGLEIVRRDWSEIAKETQARVLEALLKDGDVEKAVRIVKEVTEKLSKYEVPPEKLVIHEQITRDLKDYKATGPHVAVAKRLAARGVKIRPGTVISYIVLKGSGRIGDRAIPFDEFDPTKHKYDAEYYIENQVLPAVERILRAFGYRKEDLRYQKTRQVGLSAWLKPKGT

SEQ ID NO: 3295 - protein, 774 aa, synthetic construct
MILDTDYITEDGKPVIRIFKKENGEFKIEYDRTFEHYFYALLKDDSAIEEVKKITAERHGTVVTVKRVEKVQKKFLGRPVEVWKLYFTHPQDVPAIRDKIREHPAVIDIYEYDIPPMKRYLIDKGLVPMEGDEELKMLAFDIETLYHEGEEFAEGPILMISYADEEGARVITWKNVDLPYVDVVSTEREMIKRFLRVVKEKDPDVLITYNGDNFDFAYLKKRCEKLGINFALGRDGSEPKIQRMGDRFAVEVKGRIHFDLYPVIRRTINLPTYTLEAVYEAVFGQPKEKVYAEEITTAWETGENLERVARYSMEDAKVTYELGKEFLPMEAQLSRLIGQSLWDVSRSSTGNLVEWFLLRKAYERNELAPNKPDEKELARRRQSYEGGYVKEPERGLWENIVYLDFRSLYPSIIITHNVSPDTLNREGCKEYDVAPQVGHRFCKDFPGFIPSLLGDLLEERQKIKKKMKATIDPIERKLLDYRQRAIKILANSYYGYYGYARARWYCKECAESVTAWGREYITMTIKEIEEKYGFKVIYSDTDGFFATIPGADAETVKKKAMEFLKYINAKLPGALELEYEGFYKRGFFVTKKKYAVIDEEGKITTRGLEIVRRDWSEIAKETQARVLEALLKDGDVEKAVRIVKEVTEKLSKYEVPPEKLVIHEQITRDLKDYKATGPHVAVAKRLAARGVKIRPGTVISYIVLKGSGRIGDRAIPFDEFDPTKHKYDAEYYIENQVLPAVERILRAFGYRKEDLRYQKTRQVGLSAWLKPKGT

SEQ ID NO: 3296 - protein, 774 aa, synthetic construct
MILDTDYITEDGKPVIRIFKKENGEFKIEYDRTFEHYFYALLKDDSAIEEVKKITAERHGTVVTVKRVEKVQKKFLGRPVEVWKLYFTHPQDVPAIRDKIREHPAVIDIYEYDIPPMKRYLIIKGLVPMEGDEELKMLAFDIETLYHEGEEFAEGPILMISYADEEGARVITWKNVDLPYVDVVSTEREMIKRFLRVVKEKDPDVLITYNGDNFDFAYLKKRCEKLGINFALGRDGSEPKIQRMGDRFAVEVKGRIHFDLYPVIRRTINLPTYTLEAVYEAVFGQPKEKVYAEEITTAWETGENLERVARYSMEDAKVTYELGKEFLPMEAQLSRLIGQSLWDVSRSSTGNLVEWFLLRKAYERNELAPNKPDEKELARRRQSYEGGYVKEPERGLWENIVYLDFRSLYPSIIITHNVSPDTLNREGCKEYDVAPQVGHRFCKDFPGFIPSLLGDLLEERQKIKKKMKATIDPIERKLLDYRQRAIKILANSYYGYYGYARARWYCKECAESVTAWGREYITMTIKEIEEKYGFKVIYSDTDGFFATIPGADAETVKKKAMEFLKYINAKLPGALELEYEGFYKRGFFVTKKKYAVIDEEGKITTRGLEIVRRDWSEIAKETQARVLEALLKDGDVEKAVRIVKEVTEKLSKYEVPPEKLVIHEQITRDLKDYKATGPHVAVAKRLAARGVKIRPGTVISYIVLKGSGRIGDRAIPFDEFDPTKHKYDAEYYIENQVLPAVERILRAFGYRKEDLRYQKTRQVGLSAWLKPKGT

SEQ ID NO: 3297 - protein, 774 aa, synthetic construct
MILDTDYITEDGKPVIRIFKKENGEFKIEYDRTFEHYFYALLKDDSAIEEVKKITAERHGTVVTVKRVEKVQKKFLGRPVEVWKLYFTHPQDVPAIRDKIREHPAVIDIYEYDIPPAKRYLIIKGLVPMEGDEELKMLAFDIETLYHEGEEFAEGPILMISYADEEGARVITWKNVDLPYVDVVSTEREMIKRFLRVVKEKDPDVLITYNGDNFDFAYLKKRCEKLGINFALGRDGSEPKIQRMGDRFAVEVKGRIHFDLYPVIRRTINLPTYTLEAVYEAVFGQPKEKVYAEEITTAWETGENLERVARYSMEDAKVTYELGKEFLPMEAQLSRLIGQSLWDVSRSSTGNLVEWFLLRKAYERNELAPNKPDEKELARRRQSYEGGYVKEPERGLWENIVYLDFRSLYPSIIITHNVSPDTLNREGCKEYDVAPQVGHRFCKDFPGFIPSLLGDLLEERQKIKKKMKATIDPIERKLLDYRQRAIKILANSYYGYYGYARARWYCKECAESVTAWGREYITMTIKEIEEKYGFKVIYSDTDGFFATIPGADAETVKKKAMEFLKYINAKLPGALELEYEGFYKRGFFVTKKKYAVIDEEGKITTRGLEIVRRDWSEIAKETQARVLEALLKDGDVEKAVRIVKEVTEKLSKYEVPPEKLVIHEQITRDLKDYKATGPHVAVAKRLAARGVKIRPGTVISYIVLKGSGRIGDRAIPFDEFDPTKHKYDAEYYIENQVLPAVERILRAFGYRKEDLRYQKTRQVGLSAWLKPKGT

SEQ ID NO: 3298 - protein, 774 aa, synthetic construct
MILDTDYITEDGKPVIRIFKKENGEFKIEYDRTFEHYFYALLKDDSAIEEVKKITAERHGTVVTVKRVEKVQKKFLGRPVEVWKLYFTDPQDVPAIRDKIREHPAVIDIYEYDIPFAKRYLIDKGLVPMEGDEELKMLAFDIETLYHEGEEFAEGPILMISYADEEGARVITWKNVDLPYVDVVSTEREMIKRFLRVVKEKDPDVLITYNGDNFDFAYLKKRCEKLGINFALGRDGSEPKIQRMGDRFAVEVKGRIHFDLYPVIRRTINLPTYTLEAVYEAVFGQPKEKVYAEEITTAWETGENLERVARYSMEDAKVTYELGKEFLPMEAQLSRLIGQSLWDVSRSSTGNLVEWFLLRKAYERNELAPNKPDEKELARRRQSYEGGYVKEPERGLWENIVYLDFRSLYPSIIITHNVSPDTLNREGCKEYDVAPQVGHRFCKDFPGFIPSLLGDLLEERQKIKKKMKATIDPIERKLLDYRQRAIKILANSYYGYYGYARARWYCKECAESVTAWGREYITMTIKEIEEKYGFKVIYSDTDGFFATIPGADAETVKKKAMEFLKYINAKLPGALELEYEGFYKRGFFVTKKKYAVIDEEGKITTRGLEIVRRDWSEIAKETQARVLEALLKDGDVEKAVRIVKEVTEKLSKYEVPPEKLVIHEQITRDLKDYKATGPHVAVAKRLAARGVKIRPGTVISYIVLKGSGRIGDRAIPFDEFDPTKHKYDAEYYIENQVLPAVERILRAFGYRKEDLRYQKTRQVGLSAWLKPKGT

SEQ ID NO: 3299 - protein, 774 aa, synthetic construct
MILDTDYITEDGKPVIRIFKKENGEFKIEYDRTFEHYFYALLKDDSAIEEVKKITAERHGTVVTVKRVEKVQKKFLGRPVEVWKLYFTDPQDVPAIRDKIREHPAVIDIYEYDIPFMKRYLIDKGLVPMEGDEELKMLAFDIETLYHEGEEFAEGPILMISYADEEGARVITWKNVDLPYVDVVSTEREMIKRFLRVVKEKDPDVLITYNGDNFDFAYLKKRCEKLGINFALGRDGSEPKIQRMGDRFAVEVKGRIHFDLYPVIRRTINLPTYTLEAVYEAVFGQPKEKVYAEEITTAWETGENLERVARYSMEDAKVTYELGKEFLPMEAQLSRLIGQSLWDVSRSSTGNLVEWFLLRKAYERNELAPNKPDEKELARRRQSYEGGYVKEPERGLWENIVYLDFRSLYPSIIITHNVSPDTLNREGCKEYDVAPQVGHRFCKDFPGFIPSLLGDLLEERQKIKKKMKATIDPIERKLLDYRQRAIKILANSYYGYYGYARARWYCKECAESVTAWGREYITMTIKEIEEKYGFKVIYSDTDGFFATIPGADAETVKKKAMEFLKYINAKLPGALELEYEGFYKRGFFVTKKKYAVIDEEGKITTRGLEIVRRDWSEIAKETQARVLEALLKDGDVEKAVRIVKEVTEKLSKYEVPPEKLVIHEQITRDLKDYKATGPHVAVAKRLAARGVKIRPGTVISYIVLKGSGRIGDRAIPFDEFDPTKHKYDAEYYIENQVLPAVERILRAFGYRKEDLRYQKTRQVGLSAWLKPKGT

SEQ ID NO: 3300 - protein, 774 aa, synthetic construct
MILDTDYITEDGKPVIRIFKKENGEFKIEYDRTFEHYFYALLKDDSAIEEVKKITAERHGTVVTVKRVEKVQKKFLGRPVEVWKLYFTDPQDVPAIRDKIREHPAVIDIYEYDIPPAKRYLIDKGLVPMEGDEELKMLAFDIETLYHEGEEFAEGPILMISYADEEGARVITWKNVDLPYVDVVSTEREMIKRFLRVVKEKDPDVLITYNGDNFDFAYLKKRCEKLGINFALGRDGSEPKIQRMGDRFAVEVKGRIHFDLYPVIRRTINLPTYTLEAVYEAVFGQPKEKVYAEEITTAWETGENLERVARYSMEDAKVTYELGKEFLPMEAQLSRLIGQSLWDVSRSSTGNLVEWFLLRKAYERNELAPNKPDEKELARRRQSYEGGYVKEPERGLWENIVYLDFRSLYPSIIITHNVSPDTLNREGCKEYDVAPQVGHRFCKDFPGFIPSLLGDLLEERQKIKKKMKATIDPIERKLLDYRQRAIKILANSYYGYYGYARARWYCKECAESVTAWGREYITMTIKEIEEKYGFKVIYSDTDGFFATIPGADAETVKKKAMEFLKYINAKLPGALELEYEGFYKRGFFVTKKKYAVIDEEGKITTRGLEIVRRDWSEIAKETQARVLEALLKDGDVEKAVRIVKEVTEKLSKYEVPPEKLVIHEQITRDLKDYKATGPHVAVAKRLAARGVKIRPGTVISYIVLKGSGRIGDRAIPFDEFDPTKHKYDAEYYIENQVLPAVERILRAFGYRKEDLRYQKTRQVGLSAWLKPKGT

SEQ ID NO: 3301 - protein, 774 aa, synthetic construct
MILDTDYITEDGKPVIRIFKKENGEFKIEYDRTFEHYFYALLKDDSAIEEVKKITAERHGTVVTVKRVEKVQKKFLGRPVEVWKLYFTDPQDVPAIRDKIREHPAVIDIYEYDIPPMKRYLIDKGLVPMEGDEELKMLAFDIETLYHEGEEFAEGPILMISYADEEGARVITWKNVDLPYVDVVSTEREMIKRFLRVVKEKDPDVLITYNGDNFDFAYLKKRCEKLGINFALGRDGSEPKIQRMGDRFAVEVKGRIHFDLYPVIRRTINLPTYTLEAVYEAVFGQPKEKVYAEEITTAWETGENLERVARYSMEDAKVTYELGKEFLPMEAQLSRLIGQSLWDVSRSSTGNLVEWFLLRKAYERNELAPNKPDEKELARRRQSYEGGYVKEPERGLWENIVYLDFRSLYPSIIITHNVSPDTLNREGCKEYDVAPQVGHRFCKDFPGFIPSLLGDLLEERQKIKKKMKATIDPIERKLLDYRQRAIKILANSYYGYYGYARARWYCKECAESVTAWGREYITMTIKEIEEKYGFKVIYSDTDGFFATIPGADAETVKKKAMEFLKYINAKLPGALELEYEGFYKRGFFVTKKKYAVIDEEGKITTRGLEIVRRDWSEIAKETQARVLEALLKDGDVEKAVRIVKEVTEKLSKYEVPPEKLVIHEQITRDLKDYKATGPHVAVAKRLAARGVKIRPGTVISYIVLKGSGRIGDRAIPFDEFDPTKHKYDAEYYIENQVLPAVERILRAFGYRKEDLRYQKTRQVGLSAWLKPKGT

SEQ ID NO: 3302 - protein, 774 aa, synthetic construct
MILDTDYITEDGKPVIRIFKKENGEFKIEYDRTFEHYFYALLKDDSAIEEVKKITAERHGTVVTVKRVEKVQKKFLGRPVEVWKLYFTDFQDVPAIRDKIREHPAVIDIYEYDIPFMKRYLIDKGLVPMEGDEELKMLAFDIETLYHEGEEFAEGPILMISYADEEGARVITWKNVDLPYVDVVSTEREMIKRFLRVVKEKDPDVLITYNGDNFDFAYLKKRCEKLGINFALGRDGSEPKIQRMGDRFAVEVKGRIHFDLYPVIRRTINLPTYTLEAVYEAVFGQPKEKVYAEEITTAWETGENLERVARYSMEDAKVTYELGKEFLPMEAQLSRLIGQSLWDVSRSSTGNLVEWFLLRKAYERNELAPNKPDEKELARRRQSYEGGYVKEPERGLWENIVYLDFRSLYPSIIITHNVSPDTLNREGCKEYDVAPQVGHRFCKDFPGFIPSLLGDLLEERQKIKKKMKATIDPIERKLLDYRQRAIKILANSYYGYYGYARARWYCKECAESVTAWGREYITMTIKEIEEKYGFKVIYSDTDGFFATIPGADAETVKKKAMEFLKYINAKLPGALELEYEGFYKRGFFVTKKKYAVIDEEGKITTRGLEIVRRDWSEIAKETQARVLEALLKDGDVEKAVRIVKEVTEKLSKYEVPPEKLVIHEQITRDLKDYKATGPHVAVAKRLAARGVKIRPGTVISYIVLKGSGRIGDRAIPFDEFDPTKHKYDAEYYIENQVLPAVERILRAFGYRKEDLRYQKTRQVGLSAWLKPKGT

SEQ ID NO: 3303 - protein, 774 aa, synthetic construct
MILDTDYITEDGKPVIRIFKKENGEFKIEYDRTFEHYFYALLKDDSAIEEVKKITAERHGTVVTVKRVEKVQKKFLGRPVEVWKLYFTDFQDVPAIRDKIREHPAVIDIYEYDIPPAKRYLIDKGLVPMEGDEELKMLAFDIETLYHEGEEFAEGPILMISYADEEGARVITWKNVDLPYVDVVSTEREMIKRFLRVVKEKDPDVLITYNGDNFDFAYLKKRCEKLGINFALGRDGSEPKIQRMGDRFAVEVKGRIHFDLYPVIRRTINLPTYTLEAVYEAVFGQPKEKVYAEEITTAWETGENLERVARYSMEDAKVTYELGKEFLPMEAQLSRLIGQSLWDVSRSSTGNLVEWFLLRKAYERNELAPNKPDEKELARRRQSYEGGYVKEPERGLWENIVYLDFRSLYPSIIITHNVSPDTLNREGCKEYDVAPQVGHRFCKDFPGFIPSLLGDLLEERQKIKKKMKATIDPIERKLLDYRQRAIKILANSYYGYYGYARARWYCKECAESVTAWGREYITMTIKEIEEKYGFKVIYSDTDGFFATIPGADAETVKKKAMEFLKYINAKLPGALELEYEGFYKRGFFVTKKKYAVIDEEGKITTRGLEIVRRDWSEIAKETQARVLEALLKDGDVEKAVRIVKEVTEKLSKYEVPPEKLVIHEQITRDLKDYKATGPHVAVAKRLAARGVKIRPGTVISYIVLKGSGRIGDRAIPFDEFDPTKHKYDAEYYIENQVLPAVERILRAFGYRKEDLRYQKTRQVGLSAWLKPKGT

SEQ ID NO: 3304 - protein, 774 aa, synthetic construct
MILDTDYITEDGKPVIRIFKKENGEFKIEYDRTFEHYFYALLKDDSAIEEVKKITAERHGTVVTVKRVEKVQKKFLGRPVEVWKLYFTDFQDVPAIRDKIREHPAVIDIYEYDIPPMKRYLIDKGLVPMEGDEELKMLAFDIETLYHEGEEFAEGPILMISYADEEGARVITWKNVDLPYVDVVSTEREMIKRFLRVVKEKDPDVLITYNGDNFDFAYLKKRCEKLGINFALGRDGSEPKIQRMGDRFAVEVKGRIHFDLYPVIRRTINLPTYTLEAVYEAVFGQPKEKVYAEEITTAWETGENLERVARYSMEDAKVTYELGKEFLPMEAQLSRLIGQSLWDVSRSSTGNLVEWFLLRKAYERNELAPNKPDEKELARRRQSYEGGYVKEPERGLWENIVYLDFRSLYPSIIITHNVSPDTLNREGCKEYDVAPQVGHRFCKDFPGFIPSLLGDLLEERQKIKKKMKATIDPIERKLLDYRQRAIKILANSYYGYYGYARARWYCKECAESVTAWGREYITMTIKEIEEKYGFKVIYSDTDGFFATIPGADAETVKKKAMEFLKYINAKLPGALELEYEGFYKRGFFVTKKKYAVIDEEGKITTRGLEIVRRDWSEIAKETQARVLEALLKDGDVEKAVRIVKEVTEKLSKYEVPPEKLVIHEQITRDLKDYKATGPHVAVAKRLAARGVKIRPGTVISYIVLKGSGRIGDRAIPFDEFDPTKHKYDAEYYIENQVLPAVERILRAFGYRKEDLRYQKTRQVGLSAWLKPKGT

SEQ ID NO: 3305 - protein, 774 aa, synthetic construct
MILDTDYITEDGKPVIRIFKKENGEFKIEYDRTFEHYFYALLKDDSAIEEVKKITAERHGTVVTVKRVEKVQKKFLGRPVEVWKLYFTHFQDVPAIRDKIREHPAVIDIYEYDIPFMKRYLIDKGLVPMEGDEELKMLAFDIETLYHEGEEFAEGPILMISYADEEGARVITWKNVDLPYVDVVSTEREMIKRFLRVVKEKDPDVLITYNGDNFDFAYLKKRCEKLGINFALGRDGSEPKIQRMGDRFAVEVKGRIHFDLYPVIRRTINLPTYTLEAVYEAVFGQPKEKVYAEEITTAWETGENLERVARYSMEDAKVTYELGKEFLPMEAQLSRLIGQSLWDVSRSSTGNLVEWFLLRKAYERNELAPNKPDEKELARRRQSYEGGYVKEPERGLWENIVYLDFRSLYPSIIITHNVSPDTLNREGCKEYDVAPQVGHRFCKDFPGFIPSLLGDLLEERQKIKKKMKATIDPIERKLLDYRQRAIKILANSYYGYYGYARARWYCKECAESVTAWGREYITMTIKEIEEKYGFKVIYSDTDGFFATIPGADAETVKKKAMEFLKYINAKLPGALELEYEGFYKRGFFVTKKKYAVIDEEGKITTRGLEIVRRDWSEIAKETQARVLEALLKDGDVEKAVRIVKEVTEKLSKYEVPPEKLVIHEQITRDLKDYKATGPHVAVAKRLAARGVKIRPGTVISYIVLKGSGRIGDRAIPFDEFDPTKHKYDAEYYIENQVLPAVERILRAFGYRKEDLRYQKTRQVGLSAWLKPKGT

SEQ ID NO: 3306 - protein, 774 aa, synthetic construct
MILDTDYITEDGKPVIRIFKKENGEFKIEYDRTFEHYFYALLKDDSAIEEVKKITAERHGTVVTVKRVEKVQKKFLGRPVEVWKLYFTHFQDVPAIRDKIREHPAVIDIYEYDIPFMKRYLIIKGLVPMEGDEELKMLAFDIETLYHEGEEFAEGPILMISYADEEGARVITWKNVDLPYVDVVSTEREMIKRFLRVVKEKDPDVLITYNGDNFDFAYLKKRCEKLGINFALGRDGSEPKIQRMGDRFAVEVKGRIHFDLYPVIRRTINLPTYTLEAVYEAVFGQPKEKVYAEEITTAWETGENLERVARYSMEDAKVTYELGKEFLPMEAQLSRLIGQSLWDVSRSSTGNLVEWFLLRKAYERNELAPNKPDEKELARRRQSYEGGYVKEPERGLWENIVYLDFRSLYPSIIITHNVSPDTLNREGCKEYDVAPQVGHRFCKDFPGFIPSLLGDLLEERQKIKKKMKATIDPIERKLLDYRQRAIKILANSYYGYYGYARARWYCKECAESVTAWGREYITMTIKEIEEKYGFKVIYSDTDGFFATIPGADAETVKKKAMEFLKYINAKLPGALELEYEGFYKRGFFVTKKKYAVIDEEGKITTRGLEIVRRDWSEIAKETQARVLEALLKDGDVEKAVRIVKEVTEKLSKYEVPPEKLVIHEQITRDLKDYKATGPHVAVAKRLAARGVKIRPGTVISYIVLKGSGRIGDRAIPFDEFDPTKHKYDAEYYIENQVLPAVERILRAFGYRKEDLRYQKTRQVGLSAWLKPKGT

SEQ ID NO: 3307 - protein, 774 aa, synthetic construct
MILDTDYITEDGKPVIRIFKKENGEFKIEYDRTFEHYFYALLKDDSAIEEVKKITAERHGTVVTVKRVEKVQKKFLGRPVEVWKLYFTHFQDVPAIRDKIREHPAVIDIYEYDIPPAKRYLIDKGLVPMEGDEELKMLAFDIETLYHEGEEFAEGPILMISYADEEGARVITWKNVDLPYVDVVSTEREMIKRFLRVVKEKDPDVLITYNGDNFDFAYLKKRCEKLGINFALGRDGSEPKIQRMGDRFAVEVKGRIHFDLYPVIRRTINLPTYTLEAVYEAVFGQPKEKVYAEEITTAWETGENLERVARYSMEDAKVTYELGKEFLPMEAQLSRLIGQSLWDVSRSSTGNLVEWFLLRKAYERNELAPNKPDEKELARRRQSYEGGYVKEPERGLWENIVYLDFRSLYPSIIITHNVSPDTLNREGCKEYDVAPQVGHRFCKDFPGFIPSLLGDLLEERQKIKKKMKATIDPIERKLLDYRQRAIKILANSYYGYYGYARARWYCKECAESVTAWGREYITMTIKEIEEKYGFKVIYSDTDGFFATIPGADAETVKKKAMEFLKYINAKLPGALELEYEGFYKRGFFVTKKKYAVIDEEGKITTRGLEIVRRDWSEIAKETQARVLEALLKDGDVEKAVRIVKEVTEKLSKYEVPPEKLVIHEQITRDLKDYKATGPHVAVAKRLAARGVKIRPGTVISYIVLKGSGRIGDRAIPFDEFDPTKHKYDAEYYIENQVLPAVERILRAFGYRKEDLRYQKTRQVGLSAWLKPKGT

SEQ ID NO: 3308 - protein, 774 aa, synthetic construct
MILDTDYITEDGKPVIRIFKKENGEFKIEYDRTFEHYFYALLKDDSAIEEVKKITAERHGTVVTVKRVEKVQKKFLGRPVEVWKLYFTHFQDVPAIRDKIREHPAVIDIYEYDIPPMKRYLIDKGLVPMEGDEELKMLAFDIETLYHEGEEFAEGPILMISYADEEGARVITWKNVDLPYVDVVSTEREMIKRFLRVVKEKDPDVLITYNGDNFDFAYLKKRCEKLGINFALGRDGSEPKIQRMGDRFAVEVKGRIHFDLYPVIRRTINLPTYTLEAVYEAVFGQPKEKVYAEEITTAWETGENLERVARYSMEDAKVTYELGKEFLPMEAQLSRLIGQSLWDVSRSSTGNLVEWFLLRKAYERNELAPNKPDEKELARRRQSYEGGYVKEPERGLWENIVYLDFRSLYPSIIITHNVSPDTLNREGCKEYDVAPQVGHRFCKDFPGFIPSLLGDLLEERQKIKKKMKATIDPIERKLLDYRQRAIKILANSYYGYYGYARARWYCKECAESVTAWGREYITMTIKEIEEKYGFKVIYSDTDGFFATIPGADAETVKKKAMEFLKYINAKLPGALELEYEGFYKRGFFVTKKKYAVIDEEGKITTRGLEIVRRDWSEIAKETQARVLEALLKDGDVEKAVRIVKEVTEKLSKYEVPPEKLVIHEQITRDLKDYKATGPHVAVAKRLAARGVKIRPGTVISYIVLKGSGRIGDRAIPFDEFDPTKHKYDAEYYIENQVLPAVERILRAFGYRKEDLRYQKTRQVGLSAWLKPKGT

SEQ ID NO: 3309 - protein, 774 aa, synthetic construct
MILDTDYITEDGKPVIRIFKKENGEFKIEYDRTFEHYFYALLKDDSAIEEVKKITAERHGTVVTVKRVEKVQKKFLGRPVEVWKLYFTHFQDVPAIRDKIREHPAVIDIYEYDIPPMKRYLIIKGLVPMEGDEELKMLAFDIETLYHEGEEFAEGPILMISYADEEGARVITWKNVDLPYVDVVSTEREMIKRFLRVVKEKDPDVLITYNGDNFDFAYLKKRCEKLGINFALGRDGSEPKIQRMGDRFAVEVKGRIHFDLYPVIRRTINLPTYTLEAVYEAVFGQPKEKVYAEEITTAWETGENLERVARYSMEDAKVTYELGKEFLPMEAQLSRLIGQSLWDVSRSSTGNLVEWFLLRKAYERNELAPNKPDEKELARRRQSYEGGYVKEPERGLWENIVYLDFRSLYPSIIITHNVSPDTLNREGCKEYDVAPQVGHRFCKDFPGFIPSLLGDLLEERQKIKKKMKATIDPIERKLLDYRQRAIKILANSYYGYYGYARARWYCKECAESVTAWGREYITMTIKEIEEKYGFKVIYSDTDGFFATIPGADAETVKKKAMEFLKYINAKLPGALELEYEGFYKRGFFVTKKKYAVIDEEGKITTRGLEIVRRDWSEIAKETQARVLEALLKDGDVEKAVRIVKEVTEKLSKYEVPPEKLVIHEQITRDLKDYKATGPHVAVAKRLAARGVKIRPGTVISYIVLKGSGRIGDRAIPFDEFDPTKHKYDAEYYIENQVLPAVERILRAFGYRKEDLRYQKTRQVGLSAWLKPKGT

SEQ ID NO: 3310 - protein, 774 aa, synthetic construct
MILDTDYITEDGKPVIRIFKKENGEFKIEYDRTFEHYFYALLKDDSAIEEVKKITAERHGTVVTVKRVEKVQKKFLGRPVEVWKLYFTHFQDVDAIRDKIREHPAVIDIYEYDIPFMKRYLIDKGLVPMEGDEELKMLAFDIETLYHEGEEFAEGPILMISYADEEGARVITWKNVDLPYVDVVSTEREMIKRFLRVVKEKDPDVLITYNGDNFDFAYLKKRCEKLGINFALGRDGSEPKIQRMGDRFAVEVKGRIHFDLYPVIRRTINLPTYTLEAVYEAVFGQPKEKVYAEEITTAWETGENLERVARYSMEDAKVTYELGKEFLPMEAQLSRLIGQSLWDVSRSSTGNLVEWFLLRKAYERNELAPNKPDEKELARRRQSYEGGYVKEPERGLWENIVYLDFRSLYPSIIITHNVSPDTLNREGCKEYDVAPQVGHRFCKDFPGFIPSLLGDLLEERQKIKKKMKATIDPIERKLLDYRQRAIKILANSYYGYYGYARARWYCKECAESVTAWGREYITMTIKEIEEKYGFKVIYSDTDGFFATIPGADAETVKKKAMEFLKYINAKLPGALELEYEGFYKRGFFVTKKKYAVIDEEGKITTRGLEIVRRDWSEIAKETQARVLEALLKDGDVEKAVRIVKEVTEKLSKYEVPPEKLVIHEQITRDLKDYKATGPHVAVAKRLAARGVKIRPGTVISYIVLKGSGRIGDRAIPFDEFDPTKHKYDAEYYIENQVLPAVERILRAFGYRKEDLRYQKTRQVGLSAWLKPKGT

SEQ ID NO: 3311 - protein, 774 aa, synthetic construct
MILDTDYITEDGKPVIRIFKKENGEFKIEYDRTFEHYFYALLKDDSAIEEVKKITAERHGTVVTVKRVEKVQKKFLGRPVEVWKLYFTHFQDVPAIFDKIREHPAVIDIYEYDIPFMKRYLIDKGLVPMEGDEELKMLAFDIETLYHEGEEFAEGPILMISYADEEGARVITWKNVDLPYVDVVSTEREMIKRFLRVVKEKDPDVLITYNGDNFDFAYLKKRCEKLGINFALGRDGSEPKIQRMGDRFAVEVKGRIHFDLYPVIRRTINLPTYTLEAVYEAVFGQPKEKVYAEEITTAWETGENLERVARYSMEDAKVTYELGKEFLPMEAQLSRLIGQSLWDVSRSSTGNLVEWFLLRKAYERNELAPNKPDEKELARRRQSYEGGYVKEPERGLWENIVYLDFRSLYPSIIITHNVSPDTLNREGCKEYDVAPQVGHRFCKDFPGFIPSLLGDLLEERQKIKKKMKATIDPIERKLLDYRQRAIKILANSYYGYYGYARARWYCKECAESVTAWGREYITMTIKEIEEKYGFKVIYSDTDGFFATIPGADAETVKKKAMEFLKYINAKLPGALELEYEGFYKRGFFVTKKKYAVIDEEGKITTRGLEIVRRDWSEIAKETQARVLEALLKDGDVEKAVRIVKEVTEKLSKYEVPPEKLVIHEQITRDLKDYKATGPHVAVAKRLAARGVKIRPGTVISYIVLKGSGRIGDRAIPFDEFDPTKHKYDAEYYIENQVLPAVERILRAFGYRKEDLRYQKTRQVGLSAWLKPKGT

SEQ ID NO: 3312 - protein, 774 aa, synthetic construct
MILDTDYITEDGKPVIRIFKKENGEFKIEYDRTFEHYFYALLKDDSAIEEVKKITAERHGTVVTVKRVEKVQKKFLGRPVEVWKLYFTHFQDVPAIFDKIREHPAVIDIYEYDIPFMKRYLIIKGLVPMEGDEELKMLAFDIETLYHEGEEFAEGPILMISYADEEGARVITWKNVDLPYVDVVSTEREMIKRFLRVVKEKDPDVLITYNGDNFDFAYLKKRCEKLGINFALGRDGSEPKIQRMGDRFAVEVKGRIHFDLYPVIRRTINLPTYTLEAVYEAVFGQPKEKVYAEEITTAWETGENLERVARYSMEDAKVTYELGKEFLPMEAQLSRLIGQSLWDVSRSSTGNLVEWFLLRKAYERNELAPNKPDEKELARRRQSYEGGYVKEPERGLWENIVYLDFRSLYPSIIITHNVSPDTLNREGCKEYDVAPQVGHRFCKDFPGFIPSLLGDLLEERQKIKKKMKATIDPIERKLLDYRQRAIKILANSYYGYYGYARARWYCKECAESVTAWGREYITMTIKEIEEKYGFKVIYSDTDGFFATIPGADAETVKKKAMEFLKYINAKLPGALELEYEGFYKRGFFVTKKKYAVIDEEGKITTRGLEIVRRDWSEIAKETQARVLEALLKDGDVEKAVRIVKEVTEKLSKYEVPPEKLVIHEQITRDLKDYKATGPHVAVAKRLAARGVKIRPGTVISYIVLKGSGRIGDRAIPFDEFDPTKHKYDAEYYIENQVLPAVERILRAFGYRKEDLRYQKTRQVGLSAWLKPKGT

SEQ ID NO: 3313 - protein, 774 aa, synthetic construct
MILDTDYITEDGKPVIRIFKKENGEFKIEYDRTFEHYFYALLKDDSAIEEVKKITAERHGTVVTVKRVEKVQKKFLGRPVEVWKLYFTHFQDVPAIFDKIREHPAVIDIYEYDIPPMKRYLIDKGLVPMEGDEELKMLAFDIETLYHEGEEFAEGPILMISYADEEGARVITWKNVDLPYVDVVSTEREMIKRFLRVVKEKDPDVLITYNGDNFDFAYLKKRCEKLGINFALGRDGSEPKIQRMGDRFAVEVKGRIHFDLYPVIRRTINLPTYTLEAVYEAVFGQPKEKVYAEEITTAWETGENLERVARYSMEDAKVTYELGKEFLPMEAQLSRLIGQSLWDVSRSSTGNLVEWFLLRKAYERNELAPNKPDEKELARRRQSYEGGYVKEPERGLWENIVYLDFRSLYPSIIITHNVSPDTLNREGCKEYDVAPQVGHRFCKDFPGFIPSLLGDLLEERQKIKKKMKATIDPIERKLLDYRQRAIKILANSYYGYYGYARARWYCKECAESVTAWGREYITMTIKEIEEKYGFKVIYSDTDGFFATIPGADAETVKKKAMEFLKYINAKLPGALELEYEGFYKRGFFVTKKKYAVIDEEGKITTRGLEIVRRDWSEIAKETQARVLEALLKDGDVEKAVRIVKEVTEKLSKYEVPPEKLVIHEQITRDLKDYKATGPHVAVAKRLAARGVKIRPGTVISYIVLKGSGRIGDRAIPFDEFDPTKHKYDAEYYIENQVLPAVERILRAFGYRKEDLRYQKTRQVGLSAWLKPKGT

SEQ ID NO: 3314 - protein, 774 aa, synthetic construct
MILDTDYITEDGKPVIRIFKKENGEFKIEYDRTFEHYFYALLKDDSAIEEVKKITAERHGTVVTVKRVEKVQKKFLGRPVEVWKLYFTHFQDVPAIFDKIREHPAVIDIYEYDIPPMKRYLIIKGLVPMEGDEELKMLAFDIETLYHEGEEFAEGPILMISYADEEGARVITWKNVDLPYVDVVSTEREMIKRFLRVVKEKDPDVLITYNGDNFDFAYLKKRCEKLGINFALGRDGSEPKIQRMGDRFAVEVKGRIHFDLYPVIRRTINLPTYTLEAVYEAVFGQPKEKVYAEEITTAWETGENLERVARYSMEDAKVTYELGKEFLPMEAQLSRLIGQSLWDVSRSSTGNLVEWFLLRKAYERNELAPNKPDEKELARRRQSYEGGYVKEPERGLWENIVYLDFRSLYPSIIITHNVSPDTLNREGCKEYDVAPQVGHRFCKDFPGFIPSLLGDLLEERQKIKKKMKATIDPIERKLLDYRQRAIKILANSYYGYYGYARARWYCKECAESVTAWGREYITMTIKEIEEKYGFKVIYSDTDGFFATIPGADAETVKKKAMEFLKYINAKLPGALELEYEGFYKRGFFVTKKKYAVIDEEGKITTRGLEIVRRDWSEIAKETQARVLEALLKDGDVEKAVRIVKEVTEKLSKYEVPPEKLVIHEQITRDLKDYKATGPHVAVAKRLAARGVKIRPGTVISYIVLKGSGRIGDRAIPFDEFDPTKHKYDAEYYIENQVLPAVERILRAFGYRKEDLRYQKTRQVGLSAWLKPKGT

SEQ ID NO: 3315 - protein, 774 aa, synthetic construct
MILDTDYITEDGKPVIRIFKKENGEFKIEYDRTFEHYFYALLKDDSAIEEVKKITAERHGTVVTVKRVEKVQKKFLGRPVEVWKLYFTHPQDVDAIRDKIREHPAVIDIYEYDIPFMKRYLIDKGLVPMEGDEELKMLAFDIETLYHEGEEFAEGPILMISYADEEGARVITWKNVDLPYVDVVSTEREMIKRFLRVVKEKDPDVLITYNGDNFDFAYLKKRCEKLGINFALGRDGSEPKIQRMGDRFAVEVKGRIHFDLYPVIRRTINLPTYTLEAVYEAVFGQPKEKVYAEEITTAWETGENLERVARYSMEDAKVTYELGKEFLPMEAQLSRLIGQSLWDVSRSSTGNLVEWFLLRKAYERNELAPNKPDEKELARRRQSYEGGYVKEPERGLWENIVYLDFRSLYPSIIITHNVSPDTLNREGCKEYDVAPQVGHRFCKDFPGFIPSLLGDLLEERQKIKKKMKATIDPIERKLLDYRQRAIKILANSYYGYYGYARARWYCKECAESVTAWGREYITMTIKEIEEKYGFKVIYSDTDGFFATIPGADAETVKKKAMEFLKYINAKLPGALELEYEGFYKRGFFVTKKKYAVIDEEGKITTRGLEIVRRDWSEIAKETQARVLEALLKDGDVEKAVRIVKEVTEKLSKYEVPPEKLVIHEQITRDLKDYKATGPHVAVAKRLAARGVKIRPGTVISYIVLKGSGRIGDRAIPFDEFDPTKHKYDAEYYIENQVLPAVERILRAFGYRKEDLRYQKTRQVGLSAWLKPKGT

SEQ ID NO: 3316 - protein, 774 aa, synthetic construct
MILDTDYITEDGKPVIRIFKKENGEFKIEYDRTFEHYFYALLKDDSAIEEVKKITAERHGTVVTVKRVEKVQKKFLGRPVEVWKLYFTHPQDVDAIRDKIREHPAVIDIYEYDIPFMKRYLIIKGLVPMEGDEELKMLAFDIETLYHEGEEFAEGPILMISYADEEGARVITWKNVDLPYVDVVSTEREMIKRFLRVVKEKDPDVLITYNGDNFDFAYLKKRCEKLGINFALGRDGSEPKIQRMGDRFAVEVKGRIHFDLYPVIRRTINLPTYTLEAVYEAVFGQPKEKVYAEEITTAWETGENLERVARYSMEDAKVTYELGKEFLPMEAQLSRLIGQSLWDVSRSSTGNLVEWFLLRKAYERNELAPNKPDEKELARRRQSYEGGYVKEPERGLWENIVYLDFRSLYPSIIITHNVSPDTLNREGCKEYDVAPQVGHRFCKDFPGFIPSLLGDLLEERQKIKKKMKATIDPIERKLLDYRQRAIKILANSYYGYYGYARARWYCKECAESVTAWGREYITMTIKEIEEKYGFKVIYSDTDGFFATIPGADAETVKKKAMEFLKYINAKLPGALELEYEGFYKRGFFVTKKKYAVIDEEGKITTRGLEIVRRDWSEIAKETQARVLEALLKDGDVEKAVRIVKEVTEKLSKYEVPPEKLVIHEQITRDLKDYKATGPHVAVAKRLAARGVKIRPGTVISYIVLKGSGRIGDRAIPFDEFDPTKHKYDAEYYIENQVLPAVERILRAFGYRKEDLRYQKTRQVGLSAWLKPKGT

SEQ ID NO: 3317 - protein, 774 aa, synthetic construct
MILDTDYITEDGKPVIRIFKKENGEFKIEYDRTFEHYFYALLKDDSAIEEVKKITAERHGTVVTVKRVEKVQKKFLGRPVEVWKLYFTHPQDVPAIFDKIREHPAVIDIYEYDIPFMKRYLIDKGLVPMEGDEELKMLAFDIETLYHEGEEFAEGPILMISYADEEGARVITWKNVDLPYVDVVSTEREMIKRFLRVVKEKDPDVLITYNGDNFDFAYLKKRCEKLGINFALGRDGSEPKIQRMGDRFAVEVKGRIHFDLYPVIRRTINLPTYTLEAVYEAVFGQPKEKVYAEEITTAWETGENLERVARYSMEDAKVTYELGKEFLPMEAQLSRLIGQSLWDVSRSSTGNLVEWFLLRKAYERNELAPNKPDEKELARRRQSYEGGYVKEPERGLWENIVYLDFRSLYPSIIITHNVSPDTLNREGCKEYDVAPQVGHRFCKDFPGFIPSLLGDLLEERQKIKKKMKATIDPIERKLLDYRQRAIKILANSYYGYYGYARARWYCKECAESVTAWGREYITMTIKEIEEKYGFKVIYSDTDGFFATIPGADAETVKKKAMEFLKYINAKLPGALELEYEGFYKRGFFVTKKKYAVIDEEGKITTRGLEIVRRDWSEIAKETQARVLEALLKDGDVEKAVRIVKEVTEKLSKYEVPPEKLVIHEQITRDLKDYKATGPHVAVAKRLAARGVKIRPGTVISYIVLKGSGRIGDRAIPFDEFDPTKHKYDAEYYIENQVLPAVERILRAFGYRKEDLRYQKTRQVGLSAWLKPKGT

SEQ ID NO: 3318 - protein, 774 aa, synthetic construct
MILDTDYITEDGKPVIRIFKKENGEFKIEYDRTFEHYFYALLKDDSAIEEVKKITAERHGTVVTVKRVEKVQKKFLGRPVEVWKLYFTHPQDVPAIFDKIREHPAVIDIYEYDIPFMKRYLIIKGLVPMEGDEELKMLAFDIETLYHEGEEFAEGPILMISYADEEGARVITWKNVDLPYVDVVSTEREMIKRFLRVVKEKDPDVLITYNGDNFDFAYLKKRCEKLGINFALGRDGSEPKIQRMGDRFAVEVKGRIHFDLYPVIRRTINLPTYTLEAVYEAVFGQPKEKVYAEEITTAWETGENLERVARYSMEDAKVTYELGKEFLPMEAQLSRLIGQSLWDVSRSSTGNLVEWFLLRKAYERNELAPNKPDEKELARRRQSYEGGYVKEPERGLWENIVYLDFRSLYPSIIITHNVSPDTLNREGCKEYDVAPQVGHRFCKDFPGFIPSLLGDLLEERQKIKKKMKATIDPIERKLLDYRQRAIKILANSYYGYYGYARARWYCKECAESVTAWGREYITMTIKEIEEKYGFKVIYSDTDGFFATIPGADAETVKKKAMEFLKYINAKLPGALELEYEGFYKRGFFVTKKKYAVIDEEGKITTRGLEIVRRDWSEIAKETQARVLEALLKDGDVEKAVRIVKEVTEKLSKYEVPPEKLVIHEQITRDLKDYKATGPHVAVAKRLAARGVKIRPGTVISYIVLKGSGRIGDRAIPFDEFDPTKHKYDAEYYIENQVLPAVERILRAFGYRKEDLRYQKTRQVGLSAWLKPKGT

SEQ ID NO: 3319 - protein, 774 aa, synthetic construct
MILDTDYITEDGKPVIRIFKKENGEFKIEYDRTFEHYFYALLKDDSAIEEVKKITAERHGTVVTVKRVEKVQKKFLGRPVEVWKLYFTHPQDVPAIFDKIREHPAVIDIYEYDIPPAKRYLIDKGLVPMEGDEELKMLAFDIETLYHEGEEFAEGPILMISYADEEGARVITWKNVDLPYVDVVSTEREMIKRFLRVVKEKDPDVLITYNGDNFDFAYLKKRCEKLGINFALGRDGSEPKIQRMGDRFAVEVKGRIHFDLYPVIRRTINLPTYTLEAVYEAVFGQPKEKVYAEEITTAWETGENLERVARYSMEDAKVTYELGKEFLPMEAQLSRLIGQSLWDVSRSSTGNLVEWFLLRKAYERNELAPNKPDEKELARRRQSYEGGYVKEPERGLWENIVYLDFRSLYPSIIITHNVSPDTLNREGCKEYDVAPQVGHRFCKDFPGFIPSLLGDLLEERQKIKKKMKATIDPIERKLLDYRQRAIKILANSYYGYYGYARARWYCKECAESVTAWGREYITMTIKEIEEKYGFKVIYSDTDGFFATIPGADAETVKKKAMEFLKYINAKLPGALELEYEGFYKRGFFVTKKKYAVIDEEGKITTRGLEIVRRDWSEIAKETQARVLEALLKDGDVEKAVRIVKEVTEKLSKYEVPPEKLVIHEQITRDLKDYKATGPHVAVAKRLAARGVKIRPGTVISYIVLKGSGRIGDRAIPFDEFDPTKHKYDAEYYIENQVLPAVERILRAFGYRKEDLRYQKTRQVGLSAWLKPKGT

SEQ ID NO: 3320 - protein, 774 aa, synthetic construct
MILDTDYITEDGKPVIRIFKKENGEFKIEYDRTFEHYFYALLKDDSAIEEVKKITAERHGTVVTVKRVEKVQKKFLGRPVEVWKLYFTHPQDVPAIFDKIREHPAVIDIYEYDIPPMKRYLIDKGLVPMEGDEELKMLAFDIETLYHEGEEFAEGPILMISYADEEGARVITWKNVDLPYVDVVSTEREMIKRFLRVVKEKDPDVLITYNGDNFDFAYLKKRCEKLGINFALGRDGSEPKIQRMGDRFAVEVKGRIHFDLYPVIRRTINLPTYTLEAVYEAVFGQPKEKVYAEEITTAWETGENLERVARYSMEDAKVTYELGKEFLPMEAQLSRLIGQSLWDVSRSSTGNLVEWFLLRKAYERNELAPNKPDEKELARRRQSYEGGYVKEPERGLWENIVYLDFRSLYPSIIITHNVSPDTLNREGCKEYDVAPQVGHRFCKDFPGFIPSLLGDLLEERQKIKKKMKATIDPIERKLLDYRQRAIKILANSYYGYYGYARARWYCKECAESVTAWGREYITMTIKEIEEKYGFKVIYSDTDGFFATIPGADAETVKKKAMEFLKYINAKLPGALELEYEGFYKRGFFVTKKKYAVIDEEGKITTRGLEIVRRDWSEIAKETQARVLEALLKDGDVEKAVRIVKEVTEKLSKYEVPPEKLVIHEQITRDLKDYKATGPHVAVAKRLAARGVKIRPGTVISYIVLKGSGRIGDRAIPFDEFDPTKHKYDAEYYIENQVLPAVERILRAFGYRKEDLRYQKTRQVGLSAWLKPKGT

SEQ ID NO: 3321 - protein, 774 aa, synthetic construct
MILDTDYITEDGKPVIRIFKKENGEFKIEYDRTFEHYFYALLKDDSAIEEVKKITAERHGTVVTVKRVEKVQKKFLGRPVEVWKLYFTHPQDKPAIRDKIREHPAVIDIYEYDIPFMKRYLIDKGLVPMEGDEELKMLAFDIETLYHEGEEFAEGPILMISYADEEGARVITWKNVDLPYVDVVSTEREMIKRFLRVVKEKDPDVLITYNGDNFDFAYLKKRCEKLGINFALGRDGSEPKIQRMGDRFAVEVKGRIHFDLYPVIRRTINLPTYTLEAVYEAVFGQPKEKVYAEEITTAWETGENLERVARYSMEDAKVTYELGKEFLPMEAQLSRLIGQSLWDVSRSSTGNLVEWFLLRKAYERNELAPNKPDEKELARRRQSYEGGYVKEPERGLWENIVYLDFRSLYPSIIITHNVSPDTLNREGCKEYDVAPQVGHRFCKDFPGFIPSLLGDLLEERQKIKKKMKATIDPIERKLLDYRQRAIKILANSYYGYYGYARARWYCKECAESVTAWGREYITMTIKEIEEKYGFKVIYSDTDGFFATIPGADAETVKKKAMEFLKYINAKLPGALELEYEGFYKRGFFVTKKKYAVIDEEGKITTRGLEIVRRDWSEIAKETQARVLEALLKDGDVEKAVRIVKEVTEKLSKYEVPPEKLVIHEQITRDLKDYKATGPHVAVAKRLAARGVKIRPGTVISYIVLKGSGRIGDRAIPFDEFDPTKHKYDAEYYIENQVLPAVERILRAFGYRKEDLRYQKTRQVGLSAWLKPKGT

SEQ ID NO: 3322 - protein, 774 aa, synthetic construct
MILDTDYITEDGKPVIRIFKKENGEFKIEYDRTFEHYFYALLKDDSAIEEVKKITAERHGTVVTVKRVEKVQKKFLGRPVEVWKLYFTHPQDKPAIRDKIREHPAVIDIYEYDIPPAKRYLIDKGLVPMEGDEELKMLAFDIETLYHEGEEFAEGPILMISYADEEGARVITWKNVDLPYVDVVSTEREMIKRFLRVVKEKDPDVLITYNGDNFDFAYLKKRCEKLGINFALGRDGSEPKIQRMGDRFAVEVKGRIHFDLYPVIRRTINLPTYTLEAVYEAVFGQPKEKVYAEEITTAWETGENLERVARYSMEDAKVTYELGKEFLPMEAQLSRLIGQSLWDVSRSSTGNLVEWFLLRKAYERNELAPNKPDEKELARRRQSYEGGYVKEPERGLWENIVYLDFRSLYPSIIITHNVSPDTLNREGCKEYDVAPQVGHRFCKDFPGFIPSLLGDLLEERQKIKKKMKATIDPIERKLLDYRQRAIKILANSYYGYYGYARARWYCKECAESVTAWGREYITMTIKEIEEKYGFKVIYSDTDGFFATIPGADAETVKKKAMEFLKYINAKLPGALELEYEGFYKRGFFVTKKKYAVIDEEGKITTRGLEIVRRDWSEIAKETQARVLEALLKDGDVEKAVRIVKEVTEKLSKYEVPPEKLVIHEQITRDLKDYKATGPHVAVAKRLAARGVKIRPGTVISYIVLKGSGRIGDRAIPFDEFDPTKHKYDAEYYIENQVLPAVERILRAFGYRKEDLRYQKTRQVGLSAWLKPKGT

SEQ ID NO: 3323 - protein, 774 aa, synthetic construct
MILDTDYITEDGKPVIRIFKKENGEFKIEYDRTFEHYFYALLKDDSAIEEVKKITAERHGTVVTVKRVEKVQKKFLGRPVEVWKLYFTHPQDKDAIRDKIREHPAVIDIYEYDIPFAKRYLIDKGLVPMEGDEELKMLAFDIETLYHEGEEFAEGPILMISYADEEGARVITWKNVDLPYVDVVSTEREMIKRFLRVVKEKDPDVLITYNGDNFDFAYLKKRCEKLGINFALGRDGSEPKIQRMGDRFAVEVKGRIHFDLYPVIRRTINLPTYTLEAVYEAVFGQPKEKVYAEEITTAWETGENLERVARYSMEDAKVTYELGKEFLPMEAQLSRLIGQSLWDVSRSSTGNLVEWFLLRKAYERNELAPNKPDEKELARRRQSYEGGYVKEPERGLWENIVYLDFRSLYPSIIITHNVSPDTLNREGCKEYDVAPQVGHRFCKDFPGFIPSLLGDLLEERQKIKKKMKATIDPIERKLLDYRQRAIKILANSYYGYYGYARARWYCKECAESVTAWGREYITMTIKEIEEKYGFKVIYSDTDGFFATIPGADAETVKKKAMEFLKYINAKLPGALELEYEGFYKRGFFVTKKKYAVIDEEGKITTRGLEIVRRDWSEIAKETQARVLEALLKDGDVEKAVRIVKEVTEKLSKYEVPPEKLVIHEQITRDLKDYKATGPHVAVAKRLAARGVKIRPGTVISYIVLKGSGRIGDRAIPFDEFDPTKHKYDAEYYIENQVLPAVERILRAFGYRKEDLRYQKTRQVGLSAWLKPKGT

SEQ ID NO: 3324 - protein, 774 aa, synthetic construct
MILDTDYITEDGKPVIRIFKKENGEFKIEYDRTFEHYFYALLKDDSAIEEVKKITAERHGTVVTVKRVEKVQKKFLGRPVEVWKLYFTHPQDKDAIRDKIREHPAVIDIYEYDIPFMKRYLIDKGLVPMEGDEELKMLAFDIETLYHEGEEFAEGPILMISYADEEGARVITWKNVDLPYVDVVSTEREMIKRFLRVVKEKDPDVLITYNGDNFDFAYLKKRCEKLGINFALGRDGSEPKIQRMGDRFAVEVKGRIHFDLYPVIRRTINLPTYTLEAVYEAVFGQPKEKVYAEEITTAWETGENLERVARYSMEDAKVTYELGKEFLPMEAQLSRLIGQSLWDVSRSSTGNLVEWFLLRKAYERNELAPNKPDEKELARRRQSYEGGYVKEPERGLWENIVYLDFRSLYPSIIITHNVSPDTLNREGCKEYDVAPQVGHRFCKDFPGFIPSLLGDLLEERQKIKKKMKATIDPIERKLLDYRQRAIKILANSYYGYYGYARARWYCKECAESVTAWGREYITMTIKEIEEKYGFKVIYSDTDGFFATIPGADAETVKKKAMEFLKYINAKLPGALELEYEGFYKRGFFVTKKKYAVIDEEGKITTRGLEIVRRDWSEIAKETQARVLEALLKDGDVEKAVRIVKEVTEKLSKYEVPPEKLVIHEQITRDLKDYKATGPHVAVAKRLAARGVKIRPGTVISYIVLKGSGRIGDRAIPFDEFDPTKHKYDAEYYIENQVLPAVERILRAFGYRKEDLRYQKTRQVGLSAWLKPKGT

SEQ ID NO: 3325 - protein, 774 aa, synthetic construct
MILDTDYITEDGKPVIRIFKKENGEFKIEYDRTFEHYFYALLKDDSAIEEVKKITAERHGTVVTVKRVEKVQKKFLGRPVEVWKLYFTHPQDKDAIRDKIREHPAVIDIYEYDIPPAKRYLIDKGLVPMEGDEELKMLAFDIETLYHEGEEFAEGPILMISYADEEGARVITWKNVDLPYVDVVSTEREMIKRFLRVVKEKDPDVLITYNGDNFDFAYLKKRCEKLGINFALGRDGSEPKIQRMGDRFAVEVKGRIHFDLYPVIRRTINLPTYTLEAVYEAVFGQPKEKVYAEEITTAWETGENLERVARYSMEDAKVTYELGKEFLPMEAQLSRLIGQSLWDVSRSSTGNLVEWFLLRKAYERNELAPNKPDEKELARRRQSYEGGYVKEPERGLWENIVYLDFRSLYPSIIITHNVSPDTLNREGCKEYDVAPQVGHRFCKDFPGFIPSLLGDLLEERQKIKKKMKATIDPIERKLLDYRQRAIKILANSYYGYYGYARARWYCKECAESVTAWGREYITMTIKEIEEKYGFKVIYSDTDGFFATIPGADAETVKKKAMEFLKYINAKLPGALELEYEGFYKRGFFVTKKKYAVIDEEGKITTRGLEIVRRDWSEIAKETQARVLEALLKDGDVEKAVRIVKEVTEKLSKYEVPPEKLVIHEQITRDLKDYKATGPHVAVAKRLAARGVKIRPGTVISYIVLKGSGRIGDRAIPFDEFDPTKHKYDAEYYIENQVLPAVERILRAFGYRKEDLRYQKTRQVGLSAWLKPKGT

SEQ ID NO: 3326 - protein, 774 aa, synthetic construct
MILDTDYITEDGKPVIRIFKKENGEFKIEYDRTFEHYFYALLKDDSAIEEVKKITAERHGTVVTVKRVEKVQKKFLGRPVEVWKLYFTHPQDKPAIFDKIREHPAVIDIYEYDIPFMKRYLIDKGLVPMEGDEELKMLAFDIETLYHEGEEFAEGPILMISYADEEGARVITWKNVDLPYVDVVSTEREMIKRFLRVVKEKDPDVLITYNGDNFDFAYLKKRCEKLGINFALGRDGSEPKIQRMGDRFAVEVKGRIHFDLYPVIRRTINLPTYTLEAVYEAVFGQPKEKVYAEEITTAWETGENLERVARYSMEDAKVTYELGKEFLPMEAQLSRLIGQSLWDVSRSSTGNLVEWFLLRKAYERNELAPNKPDEKELARRRQSYEGGYVKEPERGLWENIVYLDFRSLYPSIIITHNVSPDTLNREGCKEYDVAPQVGHRFCKDFPGFIPSLLGDLLEERQKIKKKMKATIDPIERKLLDYRQRAIKILANSYYGYYGYARARWYCKECAESVTAWGREYITMTIKEIEEKYGFKVIYSDTDGFFATIPGADAETVKKKAMEFLKYINAKLPGALELEYEGFYKRGFFVTKKKYAVIDEEGKITTRGLEIVRRDWSEIAKETQARVLEALLKDGDVEKAVRIVKEVTEKLSKYEVPPEKLVIHEQITRDLKDYKATGPHVAVAKRLAARGVKIRPGTVISYIVLKGSGRIGDRAIPFDEFDPTKHKYDAEYYIENQVLPAVERILRAFGYRKEDLRYQKTRQVGLSAWLKPKGT

SEQ ID NO: 3327 - protein, 774 aa, synthetic construct
MILDTDYITEDGKPVIRIFKKENGEFKIEYDRTFEPYFYALLKDDSAIEEVKKITAERHGTVVTVKRVEKVQKKFLGRPVEVWKLYFTHFQDVPAIRDKIREHPAVIDIYEYDIPFMKRYLIDKGLVPMEGDEELKMLAFDIETLYHEGEEFAEGPILMISYADEEGARVITWKNVDLPYVDVVSTEREMIKRFLRVVKEKDPDVLITYNGDNFDFAYLKKRCEKLGINFALGRDGSEPKIQRMGDRFAVEVKGRIHFDLYPVIRRTINLPTYTLEAVYEAVFGQPKEKVYAEEITTAWETGENLERVARYSMEDAKVTYELGKEFLPMEAQLSRLIGQSLWDVSRSSTGNLVEWFLLRKAYERNELAPNKPDEKELARRRQSYEGGYVKEPERGLWENIVYLDFRSLYPSIIITHNVSPDTLNREGCKEYDVAPQVGHRFCKDFPGFIPSLLGDLLEERQKIKKKMKATIDPIERKLLDYRQRAIKILANSYYGYYGYARARWYCKECAESVTAWGREYITMTIKEIEEKYGFKVIYSDTDGFFATIPGADAETVKKKAMEFLKYINAKLPGALELEYEGFYKRGFFVTKKKYAVIDEEGKITTRGLEIVRRDWSEIAKETQARVLEALLKDGDVEKAVRIVKEVTEKLSKYEVPPEKLVIHEQITRDLKDYKATGPHVAVAKRLAARGVKIRPGTVISYIVLKGSGRIGDRAIPFDEFDPTKHKYDAEYYIENQVLPAVERILRAFGYRKEDLRYQKTRQVGLSAWLKPKGT

SEQ ID NO: 3328 - protein, 774 aa, synthetic construct
MILDTDYITEDGKPVIRIFKKENGEFKIEYDRTFEPYFYALLKDDSAIEEVKKITAERHGTVVTVKRVEKVQKKFLGRPVEVWKLYFTHFQDVPAIRDKIREHPAVIDIYEYDIPFMKRYLIIKGLVPMEGDEELKMLAFDIETLYHEGEEFAEGPILMISYADEEGARVITWKNVDLPYVDVVSTEREMIKRFLRVVKEKDPDVLITYNGDNFDFAYLKKRCEKLGINFALGRDGSEPKIQRMGDRFAVEVKGRIHFDLYPVIRRTINLPTYTLEAVYEAVFGQPKEKVYAEEITTAWETGENLERVARYSMEDAKVTYELGKEFLPMEAQLSRLIGQSLWDVSRSSTGNLVEWFLLRKAYERNELAPNKPDEKELARRRQSYEGGYVKEPERGLWENIVYLDFRSLYPSIIITHNVSPDTLNREGCKEYDVAPQVGHRFCKDFPGFIPSLLGDLLEERQKIKKKMKATIDPIERKLLDYRQRAIKILANSYYGYYGYARARWYCKECAESVTAWGREYITMTIKEIEEKYGFKVIYSDTDGFFATIPGADAETVKKKAMEFLKYINAKLPGALELEYEGFYKRGFFVTKKKYAVIDEEGKITTRGLEIVRRDWSEIAKETQARVLEALLKDGDVEKAVRIVKEVTEKLSKYEVPPEKLVIHEQITRDLKDYKATGPHVAVAKRLAARGVKIRPGTVISYIVLKGSGRIGDRAIPFDEFDPTKHKYDAEYYIENQVLPAVERILRAFGYRKEDLRYQKTRQVGLSAWLKPKGT

SEQ ID NO: 3329 - protein, 774 aa, synthetic construct
MILDTDYITEDGKPVIRIFKKENGEFKIEYDRTFEPYFYALLKDDSAIEEVKKITAERHGTVVTVKRVEKVQKKFLGRPVEVWKLYFTHFQDVPAIRDKIREHPAVIDIYEYDIPFMKQYLIDKGLVPMEGDEELKMLAFDIETLYHEGEEFAEGPILMISYADEEGARVITWKNVDLPYVDVVSTEREMIKRFLRVVKEKDPDVLITYNGDNFDFAYLKKRCEKLGINFALGRDGSEPKIQRMGDRFAVEVKGRIHFDLYPVIRRTINLPTYTLEAVYEAVFGQPKEKVYAEEITTAWETGENLERVARYSMEDAKVTYELGKEFLPMEAQLSRLIGQSLWDVSRSSTGNLVEWFLLRKAYERNELAPNKPDEKELARRRQSYEGGYVKEPERGLWENIVYLDFRSLYPSIIITHNVSPDTLNREGCKEYDVAPQVGHRFCKDFPGFIPSLLGDLLEERQKIKKKMKATIDPIERKLLDYRQRAIKILANSYYGYYGYARARWYCKECAESVTAWGREYITMTIKEIEEKYGFKVIYSDTDGFFATIPGADAETVKKKAMEFLKYINAKLPGALELEYEGFYKRGFFVTKKKYAVIDEEGKITTRGLEIVRRDWSEIAKETQARVLEALLKDGDVEKAVRIVKEVTEKLSKYEVPPEKLVIHEQITRDLKDYKATGPHVAVAKRLAARGVKIRPGTVISYIVLKGSGRIGDRAIPFDEFDPTKHKYDAEYYIENQVLPAVERILRAFGYRKEDLRYQKTRQVGLSAWLKPKGT

SEQ ID NO: 3330 - protein, 774 aa, synthetic construct
MILDTDYITEDGKPVIRIFKKENGEFKIEYDRTFEPYFYALLKDDSAIEEVKKITAERHGTVVTVKRVEKVQKKFLGRPVEVWKLYFTHFQDVPAIRDKIREHPAVIDIYEYDIPFMKQYLIIKGLVPMEGDEELKMLAFDIETLYHEGEEFAEGPILMISYADEEGARVITWKNVDLPYVDVVSTEREMIKRFLRVVKEKDPDVLITYNGDNFDFAYLKKRCEKLGINFALGRDGSEPKIQRMGDRFAVEVKGRIHFDLYPVIRRTINLPTYTLEAVYEAVFGQPKEKVYAEEITTAWETGENLERVARYSMEDAKVTYELGKEFLPMEAQLSRLIGQSLWDVSRSSTGNLVEWFLLRKAYERNELAPNKPDEKELARRRQSYEGGYVKEPERGLWENIVYLDFRSLYPSIIITHNVSPDTLNREGCKEYDVAPQVGHRFCKDFPGFIPSLLGDLLEERQKIKKKMKATIDPIERKLLDYRQRAIKILANSYYGYYGYARARWYCKECAESVTAWGREYITMTIKEIEEKYGFKVIYSDTDGFFATIPGADAETVKKKAMEFLKYINAKLPGALELEYEGFYKRGFFVTKKKYAVIDEEGKITTRGLEIVRRDWSEIAKETQARVLEALLKDGDVEKAVRIVKEVTEKLSKYEVPPEKLVIHEQITRDLKDYKATGPHVAVAKRLAARGVKIRPGTVISYIVLKGSGRIGDRAIPFDEFDPTKHKYDAEYYIENQVLPAVERILRAFGYRKEDLRYQKTRQVGLSAWLKPKGT

SEQ ID NO: 3331 - protein, 774 aa, synthetic construct
MILDTDYITEDGKPVIRIFKKENGEFKIEYDRTFEPYFYALLKDDSAIEEVKKITAERHGTVVTVKRVEKVQKKFLGRPVEVWKLYFTHFQDVPAIRDKIREHPAVIDIYEYDIPFAKRYLIIKGLVPMEGDEELKMLAFDIETLYHEGEEFAEGPILMISYADEEGARVITWKNVDLPYVDVVSTEREMIKRFLRVVKEKDPDVLITYNGDNFDFAYLKKRCEKLGINFALGRDGSEPKIQRMGDRFAVEVKGRIHFDLYPVIRRTINLPTYTLEAVYEAVFGQPKEKVYAEEITTAWETGENLERVARYSMEDAKVTYELGKEFLPMEAQLSRLIGQSLWDVSRSSTGNLVEWFLLRKAYERNELAPNKPDEKELARRRQSYEGGYVKEPERGLWENIVYLDFRSLYPSIIITHNVSPDTLNREGCKEYDVAPQVGHRFCKDFPGFIPSLLGDLLEERQKIKKKMKATIDPIERKLLDYRQRAIKILANSYYGYYGYARARWYCKECAESVTAWGREYITMTIKEIEEKYGFKVIYSDTDGFFATIPGADAETVKKKAMEFLKYINAKLPGALELEYEGFYKRGFFVTKKKYAVIDEEGKITTRGLEIVRRDWSEIAKETQARVLEALLKDGDVEKAVRIVKEVTEKLSKYEVPPEKLVIHEQITRDLKDYKATGPHVAVAKRLAARGVKIRPGTVISYIVLKGSGRIGDRAIPFDEFDPTKHKYDAEYYIENQVLPAVERILRAFGYRKEDLRYQKTRQVGLSAWLKPKGT

SEQ ID NO: 3332 - protein, 774 aa, synthetic construct
MILDTDYITEDGKPVIRIFKKENGEFKIEYDRTFEPYFYALLKDDSAIEEVKKITAERHGTVVTVKRVEKVQKKFLGRPVEVWKLYFTHFQDVPAIRDKIREHPAVIDIYEYDIPPAKRYLIDKGLVPMEGDEELKMLAFDIETLYHEGEEFAEGPILMISYADEEGARVITWKNVDLPYVDVVSTEREMIKRFLRVVKEKDPDVLITYNGDNFDFAYLKKRCEKLGINFALGRDGSEPKIQRMGDRFAVEVKGRIHFDLYPVIRRTINLPTYTLEAVYEAVFGQPKEKVYAEEITTAWETGENLERVARYSMEDAKVTYELGKEFLPMEAQLSRLIGQSLWDVSRSSTGNLVEWFLLRKAYERNELAPNKPDEKELARRRQSYEGGYVKEPERGLWENIVYLDFRSLYPSIIITHNVSPDTLNREGCKEYDVAPQVGHRFCKDFPGFIPSLLGDLLEERQKIKKKMKATIDPIERKLLDYRQRAIKILANSYYGYYGYARARWYCKECAESVTAWGREYITMTIKEIEEKYGFKVIYSDTDGFFATIPGADAETVKKKAMEFLKYINAKLPGALELEYEGFYKRGFFVTKKKYAVIDEEGKITTRGLEIVRRDWSEIAKETQARVLEALLKDGDVEKAVRIVKEVTEKLSKYEVPPEKLVIHEQITRDLKDYKATGPHVAVAKRLAARGVKIRPGTVISYIVLKGSGRIGDRAIPFDEFDPTKHKYDAEYYIENQVLPAVERILRAFGYRKEDLRYQKTRQVGLSAWLKPKGT

SEQ ID NO: 3333 - protein, 774 aa, synthetic construct
MILDTDYITEDGKPVIRIFKKENGEFKIEYDRTFEPYFYALLKDDSAIEEVKKITAERHGTVVTVKRVEKVQKKFLGRPVEVWKLYFTHFQDVPAIRDKIREHPAVIDIYEYDIPPMKRYLIDKGLVPMEGDEELKMLAFDIETLYHEGEEFAEGPILMISYADEEGARVITWKNVDLPYVDVVSTEREMIKRFLRVVKEKDPDVLITYNGDNFDFAYLKKRCEKLGINFALGRDGSEPKIQRMGDRFAVEVKGRIHFDLYPVIRRTINLPTYTLEAVYEAVFGQPKEKVYAEEITTAWETGENLERVARYSMEDAKVTYELGKEFLPMEAQLSRLIGQSLWDVSRSSTGNLVEWFLLRKAYERNELAPNKPDEKELARRRQSYEGGYVKEPERGLWENIVYLDFRSLYPSIIITHNVSPDTLNREGCKEYDVAPQVGHRFCKDFPGFIPSLLGDLLEERQKIKKKMKATIDPIERKLLDYRQRAIKILANSYYGYYGYARARWYCKECAESVTAWGREYITMTIKEIEEKYGFKVIYSDTDGFFATIPGADAETVKKKAMEFLKYINAKLPGALELEYEGFYKRGFFVTKKKYAVIDEEGKITTRGLEIVRRDWSEIAKETQARVLEALLKDGDVEKAVRIVKEVTEKLSKYEVPPEKLVIHEQITRDLKDYKATGPHVAVAKRLAARGVKIRPGTVISYIVLKGSGRIGDRAIPFDEFDPTKHKYDAEYYIENQVLPAVERILRAFGYRKEDLRYQKTRQVGLSAWLKPKGT

SEQ ID NO: 3334 - protein, 774 aa, synthetic construct
MILDTDYITEDGKPVIRIFKKENGEFKIEYDRTFEPYFYALLKDDSAIEEVKKITAERHGTVVTVKRVEKVQKKFLGRPVEVWKLYFTHFQDVPAIRDKIREHPAVIDIYEYDIPPMKRYLIIKGLVPMEGDEELKMLAFDIETLYHEGEEFAEGPILMISYADEEGARVITWKNVDLPYVDVVSTEREMIKRFLRVVKEKDPDVLITYNGDNFDFAYLKKRCEKLGINFALGRDGSEPKIQRMGDRFAVEVKGRIHFDLYPVIRRTINLPTYTLEAVYEAVFGQPKEKVYAEEITTAWETGENLERVARYSMEDAKVTYELGKEFLPMEAQLSRLIGQSLWDVSRSSTGNLVEWFLLRKAYERNELAPNKPDEKELARRRQSYEGGYVKEPERGLWENIVYLDFRSLYPSIIITHNVSPDTLNREGCKEYDVAPQVGHRFCKDFPGFIPSLLGDLLEERQKIKKKMKATIDPIERKLLDYRQRAIKILANSYYGYYGYARARWYCKECAESVTAWGREYITMTIKEIEEKYGFKVIYSDTDGFFATIPGADAETVKKKAMEFLKYINAKLPGALELEYEGFYKRGFFVTKKKYAVIDEEGKITTRGLEIVRRDWSEIAKETQARVLEALLKDGDVEKAVRIVKEVTEKLSKYEVPPEKLVIHEQITRDLKDYKATGPHVAVAKRLAARGVKIRPGTVISYIVLKGSGRIGDRAIPFDEFDPTKHKYDAEYYIENQVLPAVERILRAFGYRKEDLRYQKTRQVGLSAWLKPKGT

SEQ ID NO: 3335 - protein, 774 aa, synthetic construct
MILDTDYITEDGKPVIRIFKKENGEFKIEYDRTFEPYFYALLKDDSAIEEVKKITAERHGTVVTVKRVEKVQKKFLGRPVEVWKLYFTHFQDVPAIRDKIREHPAVIDIYEYDIPPMKQYLIDKGLVPMEGDEELKMLAFDIETLYHEGEEFAEGPILMISYADEEGARVITWKNVDLPYVDVVSTEREMIKRFLRVVKEKDPDVLITYNGDNFDFAYLKKRCEKLGINFALGRDGSEPKIQRMGDRFAVEVKGRIHFDLYPVIRRTINLPTYTLEAVYEAVFGQPKEKVYAEEITTAWETGENLERVARYSMEDAKVTYELGKEFLPMEAQLSRLIGQSLWDVSRSSTGNLVEWFLLRKAYERNELAPNKPDEKELARRRQSYEGGYVKEPERGLWENIVYLDFRSLYPSIIITHNVSPDTLNREGCKEYDVAPQVGHRFCKDFPGFIPSLLGDLLEERQKIKKKMKATIDPIERKLLDYRQRAIKILANSYYGYYGYARARWYCKECAESVTAWGREYITMTIKEIEEKYGFKVIYSDTDGFFATIPGADAETVKKKAMEFLKYINAKLPGALELEYEGFYKRGFFVTKKKYAVIDEEGKITTRGLEIVRRDWSEIAKETQARVLEALLKDGDVEKAVRIVKEVTEKLSKYEVPPEKLVIHEQITRDLKDYKATGPHVAVAKRLAARGVKIRPGTVISYIVLKGSGRIGDRAIPFDEFDPTKHKYDAEYYIENQVLPAVERILRAFGYRKEDLRYQKTRQVGLSAWLKPKGT

SEQ ID NO: 3336 - protein, 774 aa, synthetic construct
MILDTDYITEDGKPVIRIFKKENGEFKIEYDRTFEPYFYALLKDDSAIEEVKKITAERHGTVVTVKRVEKVQKKFLGRPVEVWKLYFTHFQDVPAIRDKIREHPAVIDIYEYDIPPMKQYLIIKGLVPMEGDEELKMLAFDIETLYHEGEEFAEGPILMISYADEEGARVITWKNVDLPYVDVVSTEREMIKRFLRVVKEKDPDVLITYNGDNFDFAYLKKRCEKLGINFALGRDGSEPKIQRMGDRFAVEVKGRIHFDLYPVIRRTINLPTYTLEAVYEAVFGQPKEKVYAEEITTAWETGENLERVARYSMEDAKVTYELGKEFLPMEAQLSRLIGQSLWDVSRSSTGNLVEWFLLRKAYERNELAPNKPDEKELARRRQSYEGGYVKEPERGLWENIVYLDFRSLYPSIIITHNVSPDTLNREGCKEYDVAPQVGHRFCKDFPGFIPSLLGDLLEERQKIKKKMKATIDPIERKLLDYRQRAIKILANSYYGYYGYARARWYCKECAESVTAWGREYITMTIKEIEEKYGFKVIYSDTDGFFATIPGADAETVKKKAMEFLKYINAKLPGALELEYEGFYKRGFFVTKKKYAVIDEEGKITTRGLEIVRRDWSEIAKETQARVLEALLKDGDVEKAVRIVKEVTEKLSKYEVPPEKLVIHEQITRDLKDYKATGPHVAVAKRLAARGVKIRPGTVISYIVLKGSGRIGDRAIPFDEFDPTKHKYDAEYYIENQVLPAVERILRAFGYRKEDLRYQKTRQVGLSAWLKPKGT

SEQ ID NO: 3337 - protein, 774 aa, synthetic construct
MILDTDYITEDGKPVIRIFKKENGEFKIEYDRTFEPYFYALLKDDSAIEEVKKITAERHGTVVTVKRVEKVQKKFLGRPVEVWKLYFTHFQDVPAIRDKIREHPAVIDIYEYDIPPAKRYLIIKGLVPMEGDEELKMLAFDIETLYHEGEEFAEGPILMISYADEEGARVITWKNVDLPYVDVVSTEREMIKRFLRVVKEKDPDVLITYNGDNFDFAYLKKRCEKLGINFALGRDGSEPKIQRMGDRFAVEVKGRIHFDLYPVIRRTINLPTYTLEAVYEAVFGQPKEKVYAEEITTAWETGENLERVARYSMEDAKVTYELGKEFLPMEAQLSRLIGQSLWDVSRSSTGNLVEWFLLRKAYERNELAPNKPDEKELARRRQSYEGGYVKEPERGLWENIVYLDFRSLYPSIIITHNVSPDTLNREGCKEYDVAPQVGHRFCKDFPGFIPSLLGDLLEERQKIKKKMKATIDPIERKLLDYRQRAIKILANSYYGYYGYARARWYCKECAESVTAWGREYITMTIKEIEEKYGFKVIYSDTDGFFATIPGADAETVKKKAMEFLKYINAKLPGALELEYEGFYKRGFFVTKKKYAVIDEEGKITTRGLEIVRRDWSEIAKETQARVLEALLKDGDVEKAVRIVKEVTEKLSKYEVPPEKLVIHEQITRDLKDYKATGPHVAVAKRLAARGVKIRPGTVISYIVLKGSGRIGDRAIPFDEFDPTKHKYDAEYYIENQVLPAVERILRAFGYRKEDLRYQKTRQVGLSAWLKPKGT

SEQ ID NO: 3338 - protein, 774 aa, synthetic construct
MILDTDYITEDGKPVIRIFKKENGEFKIEYDRTFEPYFYALLKDDSAIEEVKKITAERHGTVVTVKRVEKVQKKFLGRPVEVWKLYFTHFQDVPAIRDKIREHPAVIDIYEYDIPPAKQYLIIKGLVPMEGDEELKMLAFDIETLYHEGEEFAEGPILMISYADEEGARVITWKNVDLPYVDVVSTEREMIKRFLRVVKEKDPDVLITYNGDNFDFAYLKKRCEKLGINFALGRDGSEPKIQRMGDRFAVEVKGRIHFDLYPVIRRTINLPTYTLEAVYEAVFGQPKEKVYAEEITTAWETGENLERVARYSMEDAKVTYELGKEFLPMEAQLSRLIGQSLWDVSRSSTGNLVEWFLLRKAYERNELAPNKPDEKELARRRQSYEGGYVKEPERGLWENIVYLDFRSLYPSIIITHNVSPDTLNREGCKEYDVAPQVGHRFCKDFPGFIPSLLGDLLEERQKIKKKMKATIDPIERKLLDYRQRAIKILANSYYGYYGYARARWYCKECAESVTAWGREYITMTIKEIEEKYGFKVIYSDTDGFFATIPGADAETVKKKAMEFLKYINAKLPGALELEYEGFYKRGFFVTKKKYAVIDEEGKITTRGLEIVRRDWSEIAKETQARVLEALLKDGDVEKAVRIVKEVTEKLSKYEVPPEKLVIHEQITRDLKDYKATGPHVAVAKRLAARGVKIRPGTVISYIVLKGSGRIGDRAIPFDEFDPTKHKYDAEYYIENQVLPAVERILRAFGYRKEDLRYQKTRQVGLSAWLKPKGT

SEQ ID NO: 3339 - protein, 774 aa, synthetic construct
MILDTDYITEDGKPVIRIFKKENGEFKIEYDRTFEPYFYALLKDDSAIEEVKKITAERHGTVVTVKRVEKVQKKFLGRPVEVWKLYFTHFQDVDAIRDKIREHPAVIDIYEYDIPFAKRYLIDKGLVPMEGDEELKMLAFDIETLYHEGEEFAEGPILMISYADEEGARVITWKNVDLPYVDVVSTEREMIKRFLRVVKEKDPDVLITYNGDNFDFAYLKKRCEKLGINFALGRDGSEPKIQRMGDRFAVEVKGRIHFDLYPVIRRTINLPTYTLEAVYEAVFGQPKEKVYAEEITTAWETGENLERVARYSMEDAKVTYELGKEFLPMEAQLSRLIGQSLWDVSRSSTGNLVEWFLLRKAYERNELAPNKPDEKELARRRQSYEGGYVKEPERGLWENIVYLDFRSLYPSIIITHNVSPDTLNREGCKEYDVAPQVGHRFCKDFPGFIPSLLGDLLEERQKIKKKMKATIDPIERKLLDYRQRAIKILANSYYGYYGYARARWYCKECAESVTAWGREYITMTIKEIEEKYGFKVIYSDTDGFFATIPGADAETVKKKAMEFLKYINAKLPGALELEYEGFYKRGFFVTKKKYAVIDEEGKITTRGLEIVRRDWSEIAKETQARVLEALLKDGDVEKAVRIVKEVTEKLSKYEVPPEKLVIHEQITRDLKDYKATGPHVAVAKRLAARGVKIRPGTVISYIVLKGSGRIGDRAIPFDEFDPTKHKYDAEYYIENQVLPAVERILRAFGYRKEDLRYQKTRQVGLSAWLKPKGT

SEQ ID NO: 3340 - protein, 774 aa, synthetic construct
MILDTDYITEDGKPVIRIFKKENGEFKIEYDRTFEPYFYALLKDDSAIEEVKKITAERHGTVVTVKRVEKVQKKFLGRPVEVWKLYFTHFQDVDAIRDKIREHPAVIDIYEYDIPFMKRYLIDKGLVPMEGDEELKMLAFDIETLYHEGEEFAEGPILMISYADEEGARVITWKNVDLPYVDVVSTEREMIKRFLRVVKEKDPDVLITYNGDNFDFAYLKKRCEKLGINFALGRDGSEPKIQRMGDRFAVEVKGRIHFDLYPVIRRTINLPTYTLEAVYEAVFGQPKEKVYAEEITTAWETGENLERVARYSMEDAKVTYELGKEFLPMEAQLSRLIGQSLWDVSRSSTGNLVEWFLLRKAYERNELAPNKPDEKELARRRQSYEGGYVKEPERGLWENIVYLDFRSLYPSIIITHNVSPDTLNREGCKEYDVAPQVGHRFCKDFPGFIPSLLGDLLEERQKIKKKMKATIDPIERKLLDYRQRAIKILANSYYGYYGYARARWYCKECAESVTAWGREYITMTIKEIEEKYGFKVIYSDTDGFFATIPGADAETVKKKAMEFLKYINAKLPGALELEYEGFYKRGFFVTKKKYAVIDEEGKITTRGLEIVRRDWSEIAKETQARVLEALLKDGDVEKAVRIVKEVTEKLSKYEVPPEKLVIHEQITRDLKDYKATGPHVAVAKRLAARGVKIRPGTVISYIVLKGSGRIGDRAIPFDEFDPTKHKYDAEYYIENQVLPAVERILRAFGYRKEDLRYQKTRQVGLSAWLKPKGT

SEQ ID NO: 3341 - protein, 774 aa, synthetic construct
MILDTDYITEDGKPVIRIFKKENGEFKIEYDRTFEPYFYALLKDDSAIEEVKKITAERHGTVVTVKRVEKVQKKFLGRPVEVWKLYFTHFQDVDAIRDKIREHPAVIDIYEYDIPFMKRYLIIKGLVPMEGDEELKMLAFDIETLYHEGEEFAEGPILMISYADEEGARVITWKNVDLPYVDVVSTEREMIKRFLRVVKEKDPDVLITYNGDNFDFAYLKKRCEKLGINFALGRDGSEPKIQRMGDRFAVEVKGRIHFDLYPVIRRTINLPTYTLEAVYEAVFGQPKEKVYAEEITTAWETGENLERVARYSMEDAKVTYELGKEFLPMEAQLSRLIGQSLWDVSRSSTGNLVEWFLLRKAYERNELAPNKPDEKELARRRQSYEGGYVKEPERGLWENIVYLDFRSLYPSIIITHNVSPDTLNREGCKEYDVAPQVGHRFCKDFPGFIPSLLGDLLEERQKIKKKMKATIDPIERKLLDYRQRAIKILANSYYGYYGYARARWYCKECAESVTAWGREYITMTIKEIEEKYGFKVIYSDTDGFFATIPGADAETVKKKAMEFLKYINAKLPGALELEYEGFYKRGFFVTKKKYAVIDEEGKITTRGLEIVRRDWSEIAKETQARVLEALLKDGDVEKAVRIVKEVTEKLSKYEVPPEKLVIHEQITRDLKDYKATGPHVAVAKRLAARGVKIRPGTVISYIVLKGSGRIGDRAIPFDEFDPTKHKYDAEYYIENQVLPAVERILRAFGYRKEDLRYQKTRQVGLSAWLKPKGT

SEQ ID NO: 3342 - protein, 774 aa, synthetic construct
MILDTDYITEDGKPVIRIFKKENGEFKIEYDRTFEPYFYALLKDDSAIEEVKKITAERHGTVVTVKRVEKVQKKFLGRPVEVWKLYFTHFQDVDAIRDKIREHPAVIDIYEYDIPPAKRYLIDKGLVPMEGDEELKMLAFDIETLYHEGEEFAEGPILMISYADEEGARVITWKNVDLPYVDVVSTEREMIKRFLRVVKEKDPDVLITYNGDNFDFAYLKKRCEKLGINFALGRDGSEPKIQRMGDRFAVEVKGRIHFDLYPVIRRTINLPTYTLEAVYEAVFGQPKEKVYAEEITTAWETGENLERVARYSMEDAKVTYELGKEFLPMEAQLSRLIGQSLWDVSRSSTGNLVEWFLLRKAYERNELAPNKPDEKELARRRQSYEGGYVKEPERGLWENIVYLDFRSLYPSIIITHNVSPDTLNREGCKEYDVAPQVGHRFCKDFPGFIPSLLGDLLEERQKIKKKMKATIDPIERKLLDYRQRAIKILANSYYGYYGYARARWYCKECAESVTAWGREYITMTIKEIEEKYGFKVIYSDTDGFFATIPGADAETVKKKAMEFLKYINAKLPGALELEYEGFYKRGFFVTKKKYAVIDEEGKITTRGLEIVRRDWSEIAKETQARVLEALLKDGDVEKAVRIVKEVTEKLSKYEVPPEKLVIHEQITRDLKDYKATGPHVAVAKRLAARGVKIRPGTVISYIVLKGSGRIGDRAIPFDEFDPTKHKYDAEYYIENQVLPAVERILRAFGYRKEDLRYQKTRQVGLSAWLKPKGT

SEQ ID NO: 3343 - protein, 774 aa, synthetic construct
MILDTDYITEDGKPVIRIFKKENGEFKIEYDRTFEPYFYALLKDDSAIEEVKKITAERHGTVVTVKRVEKVQKKFLGRPVEVWKLYFTHFQDVDAIRDKIREHPAVIDIYEYDIPPMKRYLIDKGLVPMEGDEELKMLAFDIETLYHEGEEFAEGPILMISYADEEGARVITWKNVDLPYVDVVSTEREMIKRFLRVVKEKDPDVLITYNGDNFDFAYLKKRCEKLGINFALGRDGSEPKIQRMGDRFAVEVKGRIHFDLYPVIRRTINLPTYTLEAVYEAVFGQPKEKVYAEEITTAWETGENLERVARYSMEDAKVTYELGKEFLPMEAQLSRLIGQSLWDVSRSSTGNLVEWFLLRKAYERNELAPNKPDEKELARRRQSYEGGYVKEPERGLWENIVYLDFRSLYPSIIITHNVSPDTLNREGCKEYDVAPQVGHRFCKDFPGFIPSLLGDLLEERQKIKKKMKATIDPIERKLLDYRQRAIKILANSYYGYYGYARARWYCKECAESVTAWGREYITMTIKEIEEKYGFKVIYSDTDGFFATIPGADAETVKKKAMEFLKYINAKLPGALELEYEGFYKRGFFVTKKKYAVIDEEGKITTRGLEIVRRDWSEIAKETQARVLEALLKDGDVEKAVRIVKEVTEKLSKYEVPPEKLVIHEQITRDLKDYKATGPHVAVAKRLAARGVKIRPGTVISYIVLKGSGRIGDRAIPFDEFDPTKHKYDAEYYIENQVLPAVERILRAFGYRKEDLRYQKTRQVGLSAWLKPKGT

SEQ ID NO: 3344 - protein, 774 aa, synthetic construct
MILDTDYITEDGKPVIRIFKKENGEFKIEYDRTFEPYFYALLKDDSAIEEVKKITAERHGTVVTVKRVEKVQKKFLGRPVEVWKLYFTHFQDVDAIRDKIREHPAVIDIYEYDIPPMKRYLIIKGLVPMEGDEELKMLAFDIETLYHEGEEFAEGPILMISYADEEGARVITWKNVDLPYVDVVSTEREMIKRFLRVVKEKDPDVLITYNGDNFDFAYLKKRCEKLGINFALGRDGSEPKIQRMGDRFAVEVKGRIHFDLYPVIRRTINLPTYTLEAVYEAVFGQPKEKVYAEEITTAWETGENLERVARYSMEDAKVTYELGKEFLPMEAQLSRLIGQSLWDVSRSSTGNLVEWFLLRKAYERNELAPNKPDEKELARRRQSYEGGYVKEPERGLWENIVYLDFRSLYPSIIITHNVSPDTLNREGCKEYDVAPQVGHRFCKDFPGFIPSLLGDLLEERQKIKKKMKATIDPIERKLLDYRQRAIKILANSYYGYYGYARARWYCKECAESVTAWGREYITMTIKEIEEKYGFKVIYSDTDGFFATIPGADAETVKKKAMEFLKYINAKLPGALELEYEGFYKRGFFVTKKKYAVIDEEGKITTRGLEIVRRDWSEIAKETQARVLEALLKDGDVEKAVRIVKEVTEKLSKYEVPPEKLVIHEQITRDLKDYKATGPHVAVAKRLAARGVKIRPGTVISYIVLKGSGRIGDRAIPFDEFDPTKHKYDAEYYIENQVLPAVERILRAFGYRKEDLRYQKTRQVGLSAWLKPKGT

SEQ ID NO: 3345 - protein, 774 aa, synthetic construct
MILDTDYITEDGKPVIRIFKKENGEFKIEYDRTFEPYFYALLKDDSAIEEVKKITAERHGTVVTVKRVEKVQKKFLGRPVEVWKLYFTHFQDVDAIFDKIREHPAVIDIYEYDIPPMKRYLIIKGLVPMEGDEELKMLAFDIETLYHEGEEFAEGPILMISYADEEGARVITWKNVDLPYVDVVSTEREMIKRFLRVVKEKDPDVLITYNGDNFDFAYLKKRCEKLGINFALGRDGSEPKIQRMGDRFAVEVKGRIHFDLYPVIRRTINLPTYTLEAVYEAVFGQPKEKVYAEEITTAWETGENLERVARYSMEDAKVTYELGKEFLPMEAQLSRLIGQSLWDVSRSSTGNLVEWFLLRKAYERNELAPNKPDEKELARRRQSYEGGYVKEPERGLWENIVYLDFRSLYPSIIITHNVSPDTLNREGCKEYDVAPQVGHRFCKDFPGFIPSLLGDLLEERQKIKKKMKATIDPIERKLLDYRQRAIKILANSYYGYYGYARARWYCKECAESVTAWGREYITMTIKEIEEKYGFKVIYSDTDGFFATIPGADAETVKKKAMEFLKYINAKLPGALELEYEGFYKRGFFVTKKKYAVIDEEGKITTRGLEIVRRDWSEIAKETQARVLEALLKDGDVEKAVRIVKEVTEKLSKYEVPPEKLVIHEQITRDLKDYKATGPHVAVAKRLAARGVKIRPGTVISYIVLKGSGRIGDRAIPFDEFDPTKHKYDAEYYIENQVLPAVERILRAFGYRKEDLRYQKTRQVGLSAWLKPKGT

SEQ ID NO: 3346 - protein, 774 aa, synthetic construct
MILDTDYITEDGKPVIRIFKKENGEFKIEYDRTFEPYFYALLKDDSAIEEVKKITAERHGTVVTVKRVEKVQKKFLGRPVEVWKLYFTHFQDVPAIFDKIREHPAVIDIYEYDIPFMKRYLIDKGLVPMEGDEELKMLAFDIETLYHEGEEFAEGPILMISYADEEGARVITWKNVDLPYVDVVSTEREMIKRFLRVVKEKDPDVLITYNGDNFDFAYLKKRCEKLGINFALGRDGSEPKIQRMGDRFAVEVKGRIHFDLYPVIRRTINLPTYTLEAVYEAVFGQPKEKVYAEEITTAWETGENLERVARYSMEDAKVTYELGKEFLPMEAQLSRLIGQSLWDVSRSSTGNLVEWFLLRKAYERNELAPNKPDEKELARRRQSYEGGYVKEPERGLWENIVYLDFRSLYPSIIITHNVSPDTLNREGCKEYDVAPQVGHRFCKDFPGFIPSLLGDLLEERQKIKKKMKATIDPIERKLLDYRQRAIKILANSYYGYYGYARARWYCKECAESVTAWGREYITMTIKEIEEKYGFKVIYSDTDGFFATIPGADAETVKKKAMEFLKYINAKLPGALELEYEGFYKRGFFVTKKKYAVIDEEGKITTRGLEIVRRDWSEIAKETQARVLEALLKDGDVEKAVRIVKEVTEKLSKYEVPPEKLVIHEQITRDLKDYKATGPHVAVAKRLAARGVKIRPGTVISYIVLKGSGRIGDRAIPFDEFDPTKHKYDAEYYIENQVLPAVERILRAFGYRKEDLRYQKTRQVGLSAWLKPKGT

SEQ ID NO: 3347 - protein, 774 aa, synthetic construct
MILDTDYITEDGKPVIRIFKKENGEFKIEYDRTFEPYFYALLKDDSAIEEVKKITAERHGTVVTVKRVEKVQKKFLGRPVEVWKLYFTHFQDVPAIFDKIREHPAVIDIYEYDIPFMKRYLIIKGLVPMEGDEELKMLAFDIETLYHEGEEFAEGPILMISYADEEGARVITWKNVDLPYVDVVSTEREMIKRFLRVVKEKDPDVLITYNGDNFDFAYLKKRCEKLGINFALGRDGSEPKIQRMGDRFAVEVKGRIHFDLYPVIRRTINLPTYTLEAVYEAVFGQPKEKVYAEEITTAWETGENLERVARYSMEDAKVTYELGKEFLPMEAQLSRLIGQSLWDVSRSSTGNLVEWFLLRKAYERNELAPNKPDEKELARRRQSYEGGYVKEPERGLWENIVYLDFRSLYPSIIITHNVSPDTLNREGCKEYDVAPQVGHRFCKDFPGFIPSLLGDLLEERQKIKKKMKATIDPIERKLLDYRQRAIKILANSYYGYYGYARARWYCKECAESVTAWGREYITMTIKEIEEKYGFKVIYSDTDGFFATIPGADAETVKKKAMEFLKYINAKLPGALELEYEGFYKRGFFVTKKKYAVIDEEGKITTRGLEIVRRDWSEIAKETQARVLEALLKDGDVEKAVRIVKEVTEKLSKYEVPPEKLVIHEQITRDLKDYKATGPHVAVAKRLAARGVKIRPGTVISYIVLKGSGRIGDRAIPFDEFDPTKHKYDAEYYIENQVLPAVERILRAFGYRKEDLRYQKTRQVGLSAWLKPKGT

SEQ ID NO: 3348 - protein, 774 aa, synthetic construct
MILDTDYITEDGKPVIRIFKKENGEFKIEYDRTFEPYFYALLKDDSAIEEVKKITAERHGTVVTVKRVEKVQKKFLGRPVEVWKLYFTHFQDVPAIFDKIREHPAVIDIYEYDIPFMKQYLIIKGLVPMEGDEELKMLAFDIETLYHEGEEFAEGPILMISYADEEGARVITWKNVDLPYVDVVSTEREMIKRFLRVVKEKDPDVLITYNGDNFDFAYLKKRCEKLGINFALGRDGSEPKIQRMGDRFAVEVKGRIHFDLYPVIRRTINLPTYTLEAVYEAVFGQPKEKVYAEEITTAWETGENLERVARYSMEDAKVTYELGKEFLPMEAQLSRLIGQSLWDVSRSSTGNLVEWFLLRKAYERNELAPNKPDEKELARRRQSYEGGYVKEPERGLWENIVYLDFRSLYPSIIITHNVSPDTLNREGCKEYDVAPQVGHRFCKDFPGFIPSLLGDLLEERQKIKKKMKATIDPIERKLLDYRQRAIKILANSYYGYYGYARARWYCKECAESVTAWGREYITMTIKEIEEKYGFKVIYSDTDGFFATIPGADAETVKKKAMEFLKYINAKLPGALELEYEGFYKRGFFVTKKKYAVIDEEGKITTRGLEIVRRDWSEIAKETQARVLEALLKDGDVEKAVRIVKEVTEKLSKYEVPPEKLVIHEQITRDLKDYKATGPHVAVAKRLAARGVKIRPGTVISYIVLKGSGRIGDRAIPFDEFDPTKHKYDAEYYIENQVLPAVERILRAFGYRKEDLRYQKTRQVGLSAWLKPKGT

SEQ ID NO: 3349 - protein, 774 aa, synthetic construct
MILDTDYITEDGKPVIRIFKKENGEFKIEYDRTFEPYFYALLKDDSAIEEVKKITAERHGTVVTVKRVEKVQKKFLGRPVEVWKLYFTHFQDVPAIFDKIREHPAVIDIYEYDIPFAKRYLIIKGLVPMEGDEELKMLAFDIETLYHEGEEFAEGPILMISYADEEGARVITWKNVDLPYVDVVSTEREMIKRFLRVVKEKDPDVLITYNGDNFDFAYLKKRCEKLGINFALGRDGSEPKIQRMGDRFAVEVKGRIHFDLYPVIRRTINLPTYTLEAVYEAVFGQPKEKVYAEEITTAWETGENLERVARYSMEDAKVTYELGKEFLPMEAQLSRLIGQSLWDVSRSSTGNLVEWFLLRKAYERNELAPNKPDEKELARRRQSYEGGYVKEPERGLWENIVYLDFRSLYPSIIITHNVSPDTLNREGCKEYDVAPQVGHRFCKDFPGFIPSLLGDLLEERQKIKKKMKATIDPIERKLLDYRQRAIKILANSYYGYYGYARARWYCKECAESVTAWGREYITMTIKEIEEKYGFKVIYSDTDGFFATIPGADAETVKKKAMEFLKYINAKLPGALELEYEGFYKRGFFVTKKKYAVIDEEGKITTRGLEIVRRDWSEIAKETQARVLEALLKDGDVEKAVRIVKEVTEKLSKYEVPPEKLVIHEQITRDLKDYKATGPHVAVAKRLAARGVKIRPGTVISYIVLKGSGRIGDRAIPFDEFDPTKHKYDAEYYIENQVLPAVERILRAFGYRKEDLRYQKTRQVGLSAWLKPKGT

SEQ ID NO: 3350 - protein, 774 aa, synthetic construct
MILDTDYITEDGKPVIRIFKKENGEFKIEYDRTFEPYFYALLKDDSAIEEVKKITAERHGTVVTVKRVEKVQKKFLGRPVEVWKLYFTHFQDVPAIFDKIREHPAVIDIYEYDIPPAKRYLIDKGLVPMEGDEELKMLAFDIETLYHEGEEFAEGPILMISYADEEGARVITWKNVDLPYVDVVSTEREMIKRFLRVVKEKDPDVLITYNGDNFDFAYLKKRCEKLGINFALGRDGSEPKIQRMGDRFAVEVKGRIHFDLYPVIRRTINLPTYTLEAVYEAVFGQPKEKVYAEEITTAWETGENLERVARYSMEDAKVTYELGKEFLPMEAQLSRLIGQSLWDVSRSSTGNLVEWFLLRKAYERNELAPNKPDEKELARRRQSYEGGYVKEPERGLWENIVYLDFRSLYPSIIITHNVSPDTLNREGCKEYDVAPQVGHRFCKDFPGFIPSLLGDLLEERQKIKKKMKATIDPIERKLLDYRQRAIKILANSYYGYYGYARARWYCKECAESVTAWGREYITMTIKEIEEKYGFKVIYSDTDGFFATIPGADAETVKKKAMEFLKYINAKLPGALELEYEGFYKRGFFVTKKKYAVIDEEGKITTRGLEIVRRDWSEIAKETQARVLEALLKDGDVEKAVRIVKEVTEKLSKYEVPPEKLVIHEQITRDLKDYKATGPHVAVAKRLAARGVKIRPGTVISYIVLKGSGRIGDRAIPFDEFDPTKHKYDAEYYIENQVLPAVERILRAFGYRKEDLRYQKTRQVGLSAWLKPKGT

SEQ ID NO: 3351 - protein, 774 aa, synthetic construct
MILDTDYITEDGKPVIRIFKKENGEFKIEYDRTFEPYFYALLKDDSAIEEVKKITAERHGTVVTVKRVEKVQKKFLGRPVEVWKLYFTHFQDVPAIFDKIREHPAVIDIYEYDIPPMKRYLIDKGLVPMEGDEELKMLAFDIETLYHEGEEFAEGPILMISYADEEGARVITWKNVDLPYVDVVSTEREMIKRFLRVVKEKDPDVLITYNGDNFDFAYLKKRCEKLGINFALGRDGSEPKIQRMGDRFAVEVKGRIHFDLYPVIRRTINLPTYTLEAVYEAVFGQPKEKVYAEEITTAWETGENLERVARYSMEDAKVTYELGKEFLPMEAQLSRLIGQSLWDVSRSSTGNLVEWFLLRKAYERNELAPNKPDEKELARRRQSYEGGYVKEPERGLWENIVYLDFRSLYPSIIITHNVSPDTLNREGCKEYDVAPQVGHRFCKDFPGFIPSLLGDLLEERQKIKKKMKATIDPIERKLLDYRQRAIKILANSYYGYYGYARARWYCKECAESVTAWGREYITMTIKEIEEKYGFKVIYSDTDGFFATIPGADAETVKKKAMEFLKYINAKLPGALELEYEGFYKRGFFVTKKKYAVIDEEGKITTRGLEIVRRDWSEIAKETQARVLEALLKDGDVEKAVRIVKEVTEKLSKYEVPPEKLVIHEQITRDLKDYKATGPHVAVAKRLAARGVKIRPGTVISYIVLKGSGRIGDRAIPFDEFDPTKHKYDAEYYIENQVLPAVERILRAFGYRKEDLRYQKTRQVGLSAWLKPKGT

SEQ ID NO: 3352 - protein, 774 aa, synthetic construct
MILDTDYITEDGKPVIRIFKKENGEFKIEYDRTFEPYFYALLKDDSAIEEVKKITAERHGTVVTVKRVEKVQKKFLGRPVEVWKLYFTHFQDVPAIFDKIREHPAVIDIYEYDIPPMKRYLIIKGLVPMEGDEELKMLAFDIETLYHEGEEFAEGPILMISYADEEGARVITWKNVDLPYVDVVSTEREMIKRFLRVVKEKDPDVLITYNGDNFDFAYLKKRCEKLGINFALGRDGSEPKIQRMGDRFAVEVKGRIHFDLYPVIRRTINLPTYTLEAVYEAVFGQPKEKVYAEEITTAWETGENLERVARYSMEDAKVTYELGKEFLPMEAQLSRLIGQSLWDVSRSSTGNLVEWFLLRKAYERNELAPNKPDEKELARRRQSYEGGYVKEPERGLWENIVYLDFRSLYPSIIITHNVSPDTLNREGCKEYDVAPQVGHRFCKDFPGFIPSLLGDLLEERQKIKKKMKATIDPIERKLLDYRQRAIKILANSYYGYYGYARARWYCKECAESVTAWGREYITMTIKEIEEKYGFKVIYSDTDGFFATIPGADAETVKKKAMEFLKYINAKLPGALELEYEGFYKRGFFVTKKKYAVIDEEGKITTRGLEIVRRDWSEIAKETQARVLEALLKDGDVEKAVRIVKEVTEKLSKYEVPPEKLVIHEQITRDLKDYKATGPHVAVAKRLAARGVKIRPGTVISYIVLKGSGRIGDRAIPFDEFDPTKHKYDAEYYIENQVLPAVERILRAFGYRKEDLRYQKTRQVGLSAWLKPKGT

SEQ ID NO: 3353 - protein, 774 aa, synthetic construct
MILDTDYITEDGKPVIRIFKKENGEFKIEYDRTFEPYFYALLKDDSAIEEVKKITAERHGTVVTVKRVEKVQKKFLGRPVEVWKLYFTHFQDVPAIFDKIREHPAVIDIYEYDIPPMKQYLIIKGLVPMEGDEELKMLAFDIETLYHEGEEFAEGPILMISYADEEGARVITWKNVDLPYVDVVSTEREMIKRFLRVVKEKDPDVLITYNGDNFDFAYLKKRCEKLGINFALGRDGSEPKIQRMGDRFAVEVKGRIHFDLYPVIRRTINLPTYTLEAVYEAVFGQPKEKVYAEEITTAWETGENLERVARYSMEDAKVTYELGKEFLPMEAQLSRLIGQSLWDVSRSSTGNLVEWFLLRKAYERNELAPNKPDEKELARRRQSYEGGYVKEPERGLWENIVYLDFRSLYPSIIITHNVSPDTLNREGCKEYDVAPQVGHRFCKDFPGFIPSLLGDLLEERQKIKKKMKATIDPIERKLLDYRQRAIKILANSYYGYYGYARARWYCKECAESVTAWGREYITMTIKEIEEKYGFKVIYSDTDGFFATIPGADAETVKKKAMEFLKYINAKLPGALELEYEGFYKRGFFVTKKKYAVIDEEGKITTRGLEIVRRDWSEIAKETQARVLEALLKDGDVEKAVRIVKEVTEKLSKYEVPPEKLVIHEQITRDLKDYKATGPHVAVAKRLAARGVKIRPGTVISYIVLKGSGRIGDRAIPFDEFDPTKHKYDAEYYIENQVLPAVERILRAFGYRKEDLRYQKTRQVGLSAWLKPKGT

SEQ ID NO: 3354 - protein, 774 aa, synthetic construct
MILDTDYITEDGKPVIRIFKKENGEFKIEYDRTFEPYFYALLKDDSAIEEVKKITAERHGTVVTVKRVEKVQKKFLGRPVEVWKLYFTHFQDVPAIFDKIREHPAVIDIYEYDIPPAKRYLIIKGLVPMEGDEELKMLAFDIETLYHEGEEFAEGPILMISYADEEGARVITWKNVDLPYVDVVSTEREMIKRFLRVVKEKDPDVLITYNGDNFDFAYLKKRCEKLGINFALGRDGSEPKIQRMGDRFAVEVKGRIHFDLYPVIRRTINLPTYTLEAVYEAVFGQPKEKVYAEEITTAWETGENLERVARYSMEDAKVTYELGKEFLPMEAQLSRLIGQSLWDVSRSSTGNLVEWFLLRKAYERNELAPNKPDEKELARRRQSYEGGYVKEPERGLWENIVYLDFRSLYPSIIITHNVSPDTLNREGCKEYDVAPQVGHRFCKDFPGFIPSLLGDLLEERQKIKKKMKATIDPIERKLLDYRQRAIKILANSYYGYYGYARARWYCKECAESVTAWGREYITMTIKEIEEKYGFKVIYSDTDGFFATIPGADAETVKKKAMEFLKYINAKLPGALELEYEGFYKRGFFVTKKKYAVIDEEGKITTRGLEIVRRDWSEIAKETQARVLEALLKDGDVEKAVRIVKEVTEKLSKYEVPPEKLVIHEQITRDLKDYKATGPHVAVAKRLAARGVKIRPGTVISYIVLKGSGRIGDRAIPFDEFDPTKHKYDAEYYIENQVLPAVERILRAFGYRKEDLRYQKTRQVGLSAWLKPKGT

SEQ ID NO: 3355 - protein, 774 aa, synthetic construct
MILDTDYITEDGKPVIRIFKKENGEFKIEYDRTFEPYFYALLKDDSAIEEVKKITAERHGTVVTVKRVEKVQKKFLGRPVEVWKLYFTHFQDVPAIRDKIREHPAVIDIYEYDIPFAKQYLIIKGLVPMEGDEELKMLAFDIETLYHEGEEFAEGPILMISYADEEGARVITWKNVDLPYVDVVSTEREMIKRFLRVVKEKDPDVLITYNGDNFDFAYLKKRCEKLGINFALGRDGSEPKIQRMGDRFAVEVKGRIHFDLYPVIRRTINLPTYTLEAVYEAVFGQPKEKVYAEEITTAWETGENLERVARYSMEDAKVTYELGKEFLPMEAQLSRLIGQSLWDVSRSSTGNLVEWFLLRKAYERNELAPNKPDEKELARRRQSYEGGYVKEPERGLWENIVYLDFRSLYPSIIITHNVSPDTLNREGCKEYDVAPQVGHRFCKDFPGFIPSLLGDLLEERQKIKKKMKATIDPIERKLLDYRQRAIKILANSYYGYYGYARARWYCKECAESVTAWGREYITMTIKEIEEKYGFKVIYSDTDGFFATIPGADAETVKKKAMEFLKYINAKLPGALELEYEGFYKRGFFVTKKKYAVIDEEGKITTRGLEIVRRDWSEIAKETQARVLEALLKDGDVEKAVRIVKEVTEKLSKYEVPPEKLVIHEQITRDLKDYKATGPHVAVAKRLAARGVKIRPGTVISYIVLKGSGRIGDRAIPFDEFDPTKHKYDAEYYIENQVLPAVERILRAFGYRKEDLRYQKTRQVGLSAWLKPKGT

SEQ ID NO: 3356 - protein, 774 aa, synthetic construct
MILDTDYITEDGKPVIRIFKKENGEFKIEYDRTFEPYFYALLKDDSAIEEVKKITAERHGTVVTVKRVEKVQKKFLGRPVEVWKLYFTHFQDKPAIRDKIREHPAVIDIYEYDIPFMKRYLIDKGLVPMEGDEELKMLAFDIETLYHEGEEFAEGPILMISYADEEGARVITWKNVDLPYVDVVSTEREMIKRFLRVVKEKDPDVLITYNGDNFDFAYLKKRCEKLGINFALGRDGSEPKIQRMGDRFAVEVKGRIHFDLYPVIRRTINLPTYTLEAVYEAVFGQPKEKVYAEEITTAWETGENLERVARYSMEDAKVTYELGKEFLPMEAQLSRLIGQSLWDVSRSSTGNLVEWFLLRKAYERNELAPNKPDEKELARRRQSYEGGYVKEPERGLWENIVYLDFRSLYPSIIITHNVSPDTLNREGCKEYDVAPQVGHRFCKDFPGFIPSLLGDLLEERQKIKKKMKATIDPIERKLLDYRQRAIKILANSYYGYYGYARARWYCKECAESVTAWGREYITMTIKEIEEKYGFKVIYSDTDGFFATIPGADAETVKKKAMEFLKYINAKLPGALELEYEGFYKRGFFVTKKKYAVIDEEGKITTRGLEIVRRDWSEIAKETQARVLEALLKDGDVEKAVRIVKEVTEKLSKYEVPPEKLVIHEQITRDLKDYKATGPHVAVAKRLAARGVKIRPGTVISYIVLKGSGRIGDRAIPFDEFDPTKHKYDAEYYIENQVLPAVERILRAFGYRKEDLRYQKTRQVGLSAWLKPKGT

SEQ ID NO: 3357 - protein, 774 aa, synthetic construct
MILDTDYITEDGKPVIRIFKKENGEFKIEYDRTFEPYFYALLKDDSAIEEVKKITAERHGTVVTVKRVEKVQKKFLGRPVEVWKLYFTHFQDKPAIRDKIREHPAVIDIYEYDIPPAKRYLIDKGLVPMEGDEELKMLAFDIETLYHEGEEFAEGPILMISYADEEGARVITWKNVDLPYVDVVSTEREMIKRFLRVVKEKDPDVLITYNGDNFDFAYLKKRCEKLGINFALGRDGSEPKIQRMGDRFAVEVKGRIHFDLYPVIRRTINLPTYTLEAVYEAVFGQPKEKVYAEEITTAWETGENLERVARYSMEDAKVTYELGKEFLPMEAQLSRLIGQSLWDVSRSSTGNLVEWFLLRKAYERNELAPNKPDEKELARRRQSYEGGYVKEPERGLWENIVYLDFRSLYPSIIITHNVSPDTLNREGCKEYDVAPQVGHRFCKDFPGFIPSLLGDLLEERQKIKKKMKATIDPIERKLLDYRQRAIKILANSYYGYYGYARARWYCKECAESVTAWGREYITMTIKEIEEKYGFKVIYSDTDGFFATIPGADAETVKKKAMEFLKYINAKLPGALELEYEGFYKRGFFVTKKKYAVIDEEGKITTRGLEIVRRDWSEIAKETQARVLEALLKDGDVEKAVRIVKEVTEKLSKYEVPPEKLVIHEQITRDLKDYKATGPHVAVAKRLAARGVKIRPGTVISYIVLKGSGRIGDRAIPFDEFDPTKHKYDAEYYIENQVLPAVERILRAFGYRKEDLRYQKTRQVGLSAWLKPKGT

SEQ ID NO: 3358 - protein, 774 aa, synthetic construct
MILDTDYITEDGKPVIRIFKKENGEFKIEYDRTFEPYFYALLKDDSAIEEVKKITAERHGTVVTVKRVEKVQKKFLGRPVEVWKLYFTHFQDKPAIRDKIREHPAVIDIYEYDIPPMKRYLIDKGLVPMEGDEELKMLAFDIETLYHEGEEFAEGPILMISYADEEGARVITWKNVDLPYVDVVSTEREMIKRFLRVVKEKDPDVLITYNGDNFDFAYLKKRCEKLGINFALGRDGSEPKIQRMGDRFAVEVKGRIHFDLYPVIRRTINLPTYTLEAVYEAVFGQPKEKVYAEEITTAWETGENLERVARYSMEDAKVTYELGKEFLPMEAQLSRLIGQSLWDVSRSSTGNLVEWFLLRKAYERNELAPNKPDEKELARRRQSYEGGYVKEPERGLWENIVYLDFRSLYPSIIITHNVSPDTLNREGCKEYDVAPQVGHRFCKDFPGFIPSLLGDLLEERQKIKKKMKATIDPIERKLLDYRQRAIKILANSYYGYYGYARARWYCKECAESVTAWGREYITMTIKEIEEKYGFKVIYSDTDGFFATIPGADAETVKKKAMEFLKYINAKLPGALELEYEGFYKRGFFVTKKKYAVIDEEGKITTRGLEIVRRDWSEIAKETQARVLEALLKDGDVEKAVRIVKEVTEKLSKYEVPPEKLVIHEQITRDLKDYKATGPHVAVAKRLAARGVKIRPGTVISYIVLKGSGRIGDRAIPFDEFDPTKHKYDAEYYIENQVLPAVERILRAFGYRKEDLRYQKTRQVGLSAWLKPKGT

SEQ ID NO: 3359 - protein, 774 aa, synthetic construct
MILDTDYITEDGKPVIRIFKKENGEFKIEYDRTFEPYFYALLKDDSAIEEVKKITAERHGTVVTVKRVEKVQKKFLGRPVEVWKLYFTHFQDKPAIRDKIREHPAVIDIYEYDIPPMKRYLIIKGLVPMEGDEELKMLAFDIETLYHEGEEFAEGPILMISYADEEGARVITWKNVDLPYVDVVSTEREMIKRFLRVVKEKDPDVLITYNGDNFDFAYLKKRCEKLGINFALGRDGSEPKIQRMGDRFAVEVKGRIHFDLYPVIRRTINLPTYTLEAVYEAVFGQPKEKVYAEEITTAWETGENLERVARYSMEDAKVTYELGKEFLPMEAQLSRLIGQSLWDVSRSSTGNLVEWFLLRKAYERNELAPNKPDEKELARRRQSYEGGYVKEPERGLWENIVYLDFRSLYPSIIITHNVSPDTLNREGCKEYDVAPQVGHRFCKDFPGFIPSLLGDLLEERQKIKKKMKATIDPIERKLLDYRQRAIKILANSYYGYYGYARARWYCKECAESVTAWGREYITMTIKEIEEKYGFKVIYSDTDGFFATIPGADAETVKKKAMEFLKYINAKLPGALELEYEGFYKRGFFVTKKKYAVIDEEGKITTRGLEIVRRDWSEIAKETQARVLEALLKDGDVEKAVRIVKEVTEKLSKYEVPPEKLVIHEQITRDLKDYKATGPHVAVAKRLAARGVKIRPGTVISYIVLKGSGRIGDRAIPFDEFDPTKHKYDAEYYIENQVLPAVERILRAFGYRKEDLRYQKTRQVGLSAWLKPKGT

SEQ ID NO: 3360 - protein, 774 aa, synthetic construct
MILDTDYITEDGKPVIRIFKKENGEFKIEYDRTFEPYFYALLKDDSAIEEVKKITAERHGTVVTVKRVEKVQKKFLGRPVEVWKLYFTHFQDKPAIRDKIREHPAVIDIYEYDIPPMKQYLIDKGLVPMEGDEELKMLAFDIETLYHEGEEFAEGPILMISYADEEGARVITWKNVDLPYVDVVSTEREMIKRFLRVVKEKDPDVLITYNGDNFDFAYLKKRCEKLGINFALGRDGSEPKIQRMGDRFAVEVKGRIHFDLYPVIRRTINLPTYTLEAVYEAVFGQPKEKVYAEEITTAWETGENLERVARYSMEDAKVTYELGKEFLPMEAQLSRLIGQSLWDVSRSSTGNLVEWFLLRKAYERNELAPNKPDEKELARRRQSYEGGYVKEPERGLWENIVYLDFRSLYPSIIITHNVSPDTLNREGCKEYDVAPQVGHRFCKDFPGFIPSLLGDLLEERQKIKKKMKATIDPIERKLLDYRQRAIKILANSYYGYYGYARARWYCKECAESVTAWGREYITMTIKEIEEKYGFKVIYSDTDGFFATIPGADAETVKKKAMEFLKYINAKLPGALELEYEGFYKRGFFVTKKKYAVIDEEGKITTRGLEIVRRDWSEIAKETQARVLEALLKDGDVEKAVRIVKEVTEKLSKYEVPPEKLVIHEQITRDLKDYKATGPHVAVAKRLAARGVKIRPGTVISYIVLKGSGRIGDRAIPFDEFDPTKHKYDAEYYIENQVLPAVERILRAFGYRKEDLRYQKTRQVGLSAWLKPKGT

SEQ ID NO: 3361 - protein, 774 aa, synthetic construct
MILDTDYITEDGKPVIRIFKKENGEFKIEYDRTFEPYFYALLKDDSAIEEVKKITAERHGTVVTVKRVEKVQKKFLGRPVEVWKLYFTHFQDKPAIRDKIREHPAVIDIYEYDIPPMKQYLIIKGLVPMEGDEELKMLAFDIETLYHEGEEFAEGPILMISYADEEGARVITWKNVDLPYVDVVSTEREMIKRFLRVVKEKDPDVLITYNGDNFDFAYLKKRCEKLGINFALGRDGSEPKIQRMGDRFAVEVKGRIHFDLYPVIRRTINLPTYTLEAVYEAVFGQPKEKVYAEEITTAWETGENLERVARYSMEDAKVTYELGKEFLPMEAQLSRLIGQSLWDVSRSSTGNLVEWFLLRKAYERNELAPNKPDEKELARRRQSYEGGYVKEPERGLWENIVYLDFRSLYPSIIITHNVSPDTLNREGCKEYDVAPQVGHRFCKDFPGFIPSLLGDLLEERQKIKKKMKATIDPIERKLLDYRQRAIKILANSYYGYYGYARARWYCKECAESVTAWGREYITMTIKEIEEKYGFKVIYSDTDGFFATIPGADAETVKKKAMEFLKYINAKLPGALELEYEGFYKRGFFVTKKKYAVIDEEGKITTRGLEIVRRDWSEIAKETQARVLEALLKDGDVEKAVRIVKEVTEKLSKYEVPPEKLVIHEQITRDLKDYKATGPHVAVAKRLAARGVKIRPGTVISYIVLKGSGRIGDRAIPFDEFDPTKHKYDAEYYIENQVLPAVERILRAFGYRKEDLRYQKTRQVGLSAWLKPKGT

SEQ ID NO: 3362 - protein, 774 aa, synthetic construct
MILDTDYITEDGKPVIRIFKKENGEFKIEYDRTFEPYFYALLKDDSAIEEVKKITAERHGTVVTVKRVEKVQKKFLGRPVEVWKLYFTHFQDKDAIRDKIREHPAVIDIYEYDIPFAKRYLIDKGLVPMEGDEELKMLAFDIETLYHEGEEFAEGPILMISYADEEGARVITWKNVDLPYVDVVSTEREMIKRFLRVVKEKDPDVLITYNGDNFDFAYLKKRCEKLGINFALGRDGSEPKIQRMGDRFAVEVKGRIHFDLYPVIRRTINLPTYTLEAVYEAVFGQPKEKVYAEEITTAWETGENLERVARYSMEDAKVTYELGKEFLPMEAQLSRLIGQSLWDVSRSSTGNLVEWFLLRKAYERNELAPNKPDEKELARRRQSYEGGYVKEPERGLWENIVYLDFRSLYPSIIITHNVSPDTLNREGCKEYDVAPQVGHRFCKDFPGFIPSLLGDLLEERQKIKKKMKATIDPIERKLLDYRQRAIKILANSYYGYYGYARARWYCKECAESVTAWGREYITMTIKEIEEKYGFKVIYSDTDGFFATIPGADAETVKKKAMEFLKYINAKLPGALELEYEGFYKRGFFVTKKKYAVIDEEGKITTRGLEIVRRDWSEIAKETQARVLEALLKDGDVEKAVRIVKEVTEKLSKYEVPPEKLVIHEQITRDLKDYKATGPHVAVAKRLAARGVKIRPGTVISYIVLKGSGRIGDRAIPFDEFDPTKHKYDAEYYIENQVLPAVERILRAFGYRKEDLRYQKTRQVGLSAWLKPKGT

SEQ ID NO: 3363 - protein, 774 aa, synthetic construct
MILDTDYITEDGKPVIRIFKKENGEFKIEYDRTFEPYFYALLKDDSAIEEVKKITAERHGTVVTVKRVEKVQKKFLGRPVEVWKLYFTHFQDKDAIRDKIREHPAVIDIYEYDIPFMKRYLIDKGLVPMEGDEELKMLAFDIETLYHEGEEFAEGPILMISYADEEGARVITWKNVDLPYVDVVSTEREMIKRFLRVVKEKDPDVLITYNGDNFDFAYLKKRCEKLGINFALGRDGSEPKIQRMGDRFAVEVKGRIHFDLYPVIRRTINLPTYTLEAVYEAVFGQPKEKVYAEEITTAWETGENLERVARYSMEDAKVTYELGKEFLPMEAQLSRLIGQSLWDVSRSSTGNLVEWFLLRKAYERNELAPNKPDEKELARRRQSYEGGYVKEPERGLWENIVYLDFRSLYPSIIITHNVSPDTLNREGCKEYDVAPQVGHRFCKDFPGFIPSLLGDLLEERQKIKKKMKATIDPIERKLLDYRQRAIKILANSYYGYYGYARARWYCKECAESVTAWGREYITMTIKEIEEKYGFKVIYSDTDGFFATIPGADAETVKKKAMEFLKYINAKLPGALELEYEGFYKRGFFVTKKKYAVIDEEGKITTRGLEIVRRDWSEIAKETQARVLEALLKDGDVEKAVRIVKEVTEKLSKYEVPPEKLVIHEQITRDLKDYKATGPHVAVAKRLAARGVKIRPGTVISYIVLKGSGRIGDRAIPFDEFDPTKHKYDAEYYIENQVLPAVERILRAFGYRKEDLRYQKTRQVGLSAWLKPKGT

SEQ ID NO: 3364 - protein, 774 aa, synthetic construct
MILDTDYITEDGKPVIRIFKKENGEFKIEYDRTFEPYFYALLKDDSAIEEVKKITAERHGTVVTVKRVEKVQKKFLGRPVEVWKLYFTHFQDKDAIRDKIREHPAVIDIYEYDIPPAKRYLIDKGLVPMEGDEELKMLAFDIETLYHEGEEFAEGPILMISYADEEGARVITWKNVDLPYVDVVSTEREMIKRFLRVVKEKDPDVLITYNGDNFDFAYLKKRCEKLGINFALGRDGSEPKIQRMGDRFAVEVKGRIHFDLYPVIRRTINLPTYTLEAVYEAVFGQPKEKVYAEEITTAWETGENLERVARYSMEDAKVTYELGKEFLPMEAQLSRLIGQSLWDVSRSSTGNLVEWFLLRKAYERNELAPNKPDEKELARRRQSYEGGYVKEPERGLWENIVYLDFRSLYPSIIITHNVSPDTLNREGCKEYDVAPQVGHRFCKDFPGFIPSLLGDLLEERQKIKKKMKATIDPIERKLLDYRQRAIKILANSYYGYYGYARARWYCKECAESVTAWGREYITMTIKEIEEKYGFKVIYSDTDGFFATIPGADAETVKKKAMEFLKYINAKLPGALELEYEGFYKRGFFVTKKKYAVIDEEGKITTRGLEIVRRDWSEIAKETQARVLEALLKDGDVEKAVRIVKEVTEKLSKYEVPPEKLVIHEQITRDLKDYKATGPHVAVAKRLAARGVKIRPGTVISYIVLKGSGRIGDRAIPFDEFDPTKHKYDAEYYIENQVLPAVERILRAFGYRKEDLRYQKTRQVGLSAWLKPKGT

SEQ ID NO: 3365 - protein, 774 aa, synthetic construct
MILDTDYITEDGKPVIRIFKKENGEFKIEYDRTFEPYFYALLKDDSAIEEVKKITAERHGTVVTVKRVEKVQKKFLGRPVEVWKLYFTHFQDKDAIRDKIREHPAVIDIYEYDIPPMKRYLIDKGLVPMEGDEELKMLAFDIETLYHEGEEFAEGPILMISYADEEGARVITWKNVDLPYVDVVSTEREMIKRFLRVVKEKDPDVLITYNGDNFDFAYLKKRCEKLGINFALGRDGSEPKIQRMGDRFAVEVKGRIHFDLYPVIRRTINLPTYTLEAVYEAVFGQPKEKVYAEEITTAWETGENLERVARYSMEDAKVTYELGKEFLPMEAQLSRLIGQSLWDVSRSSTGNLVEWFLLRKAYERNELAPNKPDEKELARRRQSYEGGYVKEPERGLWENIVYLDFRSLYPSIIITHNVSPDTLNREGCKEYDVAPQVGHRFCKDFPGFIPSLLGDLLEERQKIKKKMKATIDPIERKLLDYRQRAIKILANSYYGYYGYARARWYCKECAESVTAWGREYITMTIKEIEEKYGFKVIYSDTDGFFATIPGADAETVKKKAMEFLKYINAKLPGALELEYEGFYKRGFFVTKKKYAVIDEEGKITTRGLEIVRRDWSEIAKETQARVLEALLKDGDVEKAVRIVKEVTEKLSKYEVPPEKLVIHEQITRDLKDYKATGPHVAVAKRLAARGVKIRPGTVISYIVLKGSGRIGDRAIPFDEFDPTKHKYDAEYYIENQVLPAVERILRAFGYRKEDLRYQKTRQVGLSAWLKPKGT

SEQ ID NO: 3366 - protein, 774 aa, synthetic construct
MILDTDYITEDGKPVIRIFKKENGEFKIEYDRTFEPYFYALLKDDSAIEEVKKITAERHGTVVTVKRVEKVQKKFLGRPVEVWKLYFTHFQDKDAIRDKIREHPAVIDIYEYDIPPMKQYLIDKGLVPMEGDEELKMLAFDIETLYHEGEEFAEGPILMISYADEEGARVITWKNVDLPYVDVVSTEREMIKRFLRVVKEKDPDVLITYNGDNFDFAYLKKRCEKLGINFALGRDGSEPKIQRMGDRFAVEVKGRIHFDLYPVIRRTINLPTYTLEAVYEAVFGQPKEKVYAEEITTAWETGENLERVARYSMEDAKVTYELGKEFLPMEAQLSRLIGQSLWDVSRSSTGNLVEWFLLRKAYERNELAPNKPDEKELARRRQSYEGGYVKEPERGLWENIVYLDFRSLYPSIIITHNVSPDTLNREGCKEYDVAPQVGHRFCKDFPGFIPSLLGDLLEERQKIKKKMKATIDPIERKLLDYRQRAIKILANSYYGYYGYARARWYCKECAESVTAWGREYITMTIKEIEEKYGFKVIYSDTDGFFATIPGADAETVKKKAMEFLKYINAKLPGALELEYEGFYKRGFFVTKKKYAVIDEEGKITTRGLEIVRRDWSEIAKETQARVLEALLKDGDVEKAVRIVKEVTEKLSKYEVPPEKLVIHEQITRDLKDYKATGPHVAVAKRLAARGVKIRPGTVISYIVLKGSGRIGDRAIPFDEFDPTKHKYDAEYYIENQVLPAVERILRAFGYRKEDLRYQKTRQVGLSAWLKPKGT

SEQ ID NO: 3367 - protein, 774 aa, synthetic construct
MILDTDYITEDGKPVIRIFKKENGEFKIEYDRTFEPYFYALLKDDSAIEEVKKITAERHGTVVTVKRVEKVQKKFLGRPVEVWKLYFTHFQDKDAIRDKIREHPAVIDIYEYDIPPMKQYLIIKGLVPMEGDEELKMLAFDIETLYHEGEEFAEGPILMISYADEEGARVITWKNVDLPYVDVVSTEREMIKRFLRVVKEKDPDVLITYNGDNFDFAYLKKRCEKLGINFALGRDGSEPKIQRMGDRFAVEVKGRIHFDLYPVIRRTINLPTYTLEAVYEAVFGQPKEKVYAEEITTAWETGENLERVARYSMEDAKVTYELGKEFLPMEAQLSRLIGQSLWDVSRSSTGNLVEWFLLRKAYERNELAPNKPDEKELARRRQSYEGGYVKEPERGLWENIVYLDFRSLYPSIIITHNVSPDTLNREGCKEYDVAPQVGHRFCKDFPGFIPSLLGDLLEERQKIKKKMKATIDPIERKLLDYRQRAIKILANSYYGYYGYARARWYCKECAESVTAWGREYITMTIKEIEEKYGFKVIYSDTDGFFATIPGADAETVKKKAMEFLKYINAKLPGALELEYEGFYKRGFFVTKKKYAVIDEEGKITTRGLEIVRRDWSEIAKETQARVLEALLKDGDVEKAVRIVKEVTEKLSKYEVPPEKLVIHEQITRDLKDYKATGPHVAVAKRLAARGVKIRPGTVISYIVLKGSGRIGDRAIPFDEFDPTKHKYDAEYYIENQVLPAVERILRAFGYRKEDLRYQKTRQVGLSAWLKPKGT

SEQ ID NO: 3368 - protein, 774 aa, synthetic construct
MILDTDYITEDGKPVIRIFKKENGEFKIEYDRTFEPYFYALLKDDSAIEEVKKITAERHGTVVTVKRVEKVQKKFLGRPVEVWKLYFTHFQDKDAIFDKIREHPAVIDIYEYDIPFMKRYLIDKGLVPMEGDEELKMLAFDIETLYHEGEEFAEGPILMISYADEEGARVITWKNVDLPYVDVVSTEREMIKRFLRVVKEKDPDVLITYNGDNFDFAYLKKRCEKLGINFALGRDGSEPKIQRMGDRFAVEVKGRIHFDLYPVIRRTINLPTYTLEAVYEAVFGQPKEKVYAEEITTAWETGENLERVARYSMEDAKVTYELGKEFLPMEAQLSRLIGQSLWDVSRSSTGNLVEWFLLRKAYERNELAPNKPDEKELARRRQSYEGGYVKEPERGLWENIVYLDFRSLYPSIIITHNVSPDTLNREGCKEYDVAPQVGHRFCKDFPGFIPSLLGDLLEERQKIKKKMKATIDPIERKLLDYRQRAIKILANSYYGYYGYARARWYCKECAESVTAWGREYITMTIKEIEEKYGFKVIYSDTDGFFATIPGADAETVKKKAMEFLKYINAKLPGALELEYEGFYKRGFFVTKKKYAVIDEEGKITTRGLEIVRRDWSEIAKETQARVLEALLKDGDVEKAVRIVKEVTEKLSKYEVPPEKLVIHEQITRDLKDYKATGPHVAVAKRLAARGVKIRPGTVISYIVLKGSGRIGDRAIPFDEFDPTKHKYDAEYYIENQVLPAVERILRAFGYRKEDLRYQKTRQVGLSAWLKPKGT

SEQ ID NO: 3369 - protein, 774 aa, synthetic construct
MILDTDYITEDGKPVIRIFKKENGEFKIEYDRTFEPYFYALLKDDSAIEEVKKITAERHGTVVTVKRVEKVQKKFLGRPVEVWKLYFTHFQDKDAIFDKIREHPAVIDIYEYDIPPAKRYLIDKGLVPMEGDEELKMLAFDIETLYHEGEEFAEGPILMISYADEEGARVITWKNVDLPYVDVVSTEREMIKRFLRVVKEKDPDVLITYNGDNFDFAYLKKRCEKLGINFALGRDGSEPKIQRMGDRFAVEVKGRIHFDLYPVIRRTINLPTYTLEAVYEAVFGQPKEKVYAEEITTAWETGENLERVARYSMEDAKVTYELGKEFLPMEAQLSRLIGQSLWDVSRSSTGNLVEWFLLRKAYERNELAPNKPDEKELARRRQSYEGGYVKEPERGLWENIVYLDFRSLYPSIIITHNVSPDTLNREGCKEYDVAPQVGHRFCKDFPGFIPSLLGDLLEERQKIKKKMKATIDPIERKLLDYRQRAIKILANSYYGYYGYARARWYCKECAESVTAWGREYITMTIKEIEEKYGFKVIYSDTDGFFATIPGADAETVKKKAMEFLKYINAKLPGALELEYEGFYKRGFFVTKKKYAVIDEEGKITTRGLEIVRRDWSEIAKETQARVLEALLKDGDVEKAVRIVKEVTEKLSKYEVPPEKLVIHEQITRDLKDYKATGPHVAVAKRLAARGVKIRPGTVISYIVLKGSGRIGDRAIPFDEFDPTKHKYDAEYYIENQVLPAVERILRAFGYRKEDLRYQKTRQVGLSAWLKPKGT

SEQ ID NO: 3370 - protein, 774 aa, synthetic construct
MILDTDYITEDGKPVIRIFKKENGEFKIEYDRTFEPYFYALLKDDSAIEEVKKITAERHGTVVTVKRVEKVQKKFLGRPVEVWKLYFTHFQDKDAIFDKIREHPAVIDIYEYDIPPMKRYLIDKGLVPMEGDEELKMLAFDIETLYHEGEEFAEGPILMISYADEEGARVITWKNVDLPYVDVVSTEREMIKRFLRVVKEKDPDVLITYNGDNFDFAYLKKRCEKLGINFALGRDGSEPKIQRMGDRFAVEVKGRIHFDLYPVIRRTINLPTYTLEAVYEAVFGQPKEKVYAEEITTAWETGENLERVARYSMEDAKVTYELGKEFLPMEAQLSRLIGQSLWDVSRSSTGNLVEWFLLRKAYERNELAPNKPDEKELARRRQSYEGGYVKEPERGLWENIVYLDFRSLYPSIIITHNVSPDTLNREGCKEYDVAPQVGHRFCKDFPGFIPSLLGDLLEERQKIKKKMKATIDPIERKLLDYRQRAIKILANSYYGYYGYARARWYCKECAESVTAWGREYITMTIKEIEEKYGFKVIYSDTDGFFATIPGADAETVKKKAMEFLKYINAKLPGALELEYEGFYKRGFFVTKKKYAVIDEEGKITTRGLEIVRRDWSEIAKETQARVLEALLKDGDVEKAVRIVKEVTEKLSKYEVPPEKLVIHEQITRDLKDYKATGPHVAVAKRLAARGVKIRPGTVISYIVLKGSGRIGDRAIPFDEFDPTKHKYDAEYYIENQVLPAVERILRAFGYRKEDLRYQKTRQVGLSAWLKPKGT

SEQ ID NO: 3371 - protein, 774 aa, synthetic construct
MILDTDYITEDGKPVIRIFKKENGEFKIEYDRTFEPYFYALLKDDSAIEEVKKITAERHGTVVTVKRVEKVQKKFLGRPVEVWKLYFTHFQDKDAIFDKIREHPAVIDIYEYDIPPMKQYLIIKGLVPMEGDEELKMLAFDIETLYHEGEEFAEGPILMISYADEEGARVITWKNVDLPYVDVVSTEREMIKRFLRVVKEKDPDVLITYNGDNFDFAYLKKRCEKLGINFALGRDGSEPKIQRMGDRFAVEVKGRIHFDLYPVIRRTINLPTYTLEAVYEAVFGQPKEKVYAEEITTAWETGENLERVARYSMEDAKVTYELGKEFLPMEAQLSRLIGQSLWDVSRSSTGNLVEWFLLRKAYERNELAPNKPDEKELARRRQSYEGGYVKEPERGLWENIVYLDFRSLYPSIIITHNVSPDTLNREGCKEYDVAPQVGHRFCKDFPGFIPSLLGDLLEERQKIKKKMKATIDPIERKLLDYRQRAIKILANSYYGYYGYARARWYCKECAESVTAWGREYITMTIKEIEEKYGFKVIYSDTDGFFATIPGADAETVKKKAMEFLKYINAKLPGALELEYEGFYKRGFFVTKKKYAVIDEEGKITTRGLEIVRRDWSEIAKETQARVLEALLKDGDVEKAVRIVKEVTEKLSKYEVPPEKLVIHEQITRDLKDYKATGPHVAVAKRLAARGVKIRPGTVISYIVLKGSGRIGDRAIPFDEFDPTKHKYDAEYYIENQVLPAVERILRAFGYRKEDLRYQKTRQVGLSAWLKPKGT

SEQ ID NO: 3372 - protein, 774 aa, synthetic construct
MILDTDYITEDGKPVIRIFKKENGEFKIEYDRTFEPYFYALLKDDSAIEEVKKITAERHGTVVTVKRVEKVQKKFLGRPVEVWKLYFTHFQDKPAIFDKIREHPAVIDIYEYDIPFMKRYLIDKGLVPMEGDEELKMLAFDIETLYHEGEEFAEGPILMISYADEEGARVITWKNVDLPYVDVVSTEREMIKRFLRVVKEKDPDVLITYNGDNFDFAYLKKRCEKLGINFALGRDGSEPKIQRMGDRFAVEVKGRIHFDLYPVIRRTINLPTYTLEAVYEAVFGQPKEKVYAEEITTAWETGENLERVARYSMEDAKVTYELGKEFLPMEAQLSRLIGQSLWDVSRSSTGNLVEWFLLRKAYERNELAPNKPDEKELARRRQSYEGGYVKEPERGLWENIVYLDFRSLYPSIIITHNVSPDTLNREGCKEYDVAPQVGHRFCKDFPGFIPSLLGDLLEERQKIKKKMKATIDPIERKLLDYRQRAIKILANSYYGYYGYARARWYCKECAESVTAWGREYITMTIKEIEEKYGFKVIYSDTDGFFATIPGADAETVKKKAMEFLKYINAKLPGALELEYEGFYKRGFFVTKKKYAVIDEEGKITTRGLEIVRRDWSEIAKETQARVLEALLKDGDVEKAVRIVKEVTEKLSKYEVPPEKLVIHEQITRDLKDYKATGPHVAVAKRLAARGVKIRPGTVISYIVLKGSGRIGDRAIPFDEFDPTKHKYDAEYYIENQVLPAVERILRAFGYRKEDLRYQKTRQVGLSAWLKPKGT

SEQ ID NO: 3373 - protein, 774 aa, synthetic construct
MILDTDYITEDGKPVIRIFKKENGEFKIEYDRTFEPYFYALLKDDSAIEEVKKITAERHGTVVTVKRVEKVQKKFLGRPVEVWKLYFTHFQDKPAIFDKIREHPAVIDIYEYDIPPMKRYLIDKGLVPMEGDEELKMLAFDIETLYHEGEEFAEGPILMISYADEEGARVITWKNVDLPYVDVVSTEREMIKRFLRVVKEKDPDVLITYNGDNFDFAYLKKRCEKLGINFALGRDGSEPKIQRMGDRFAVEVKGRIHFDLYPVIRRTINLPTYTLEAVYEAVFGQPKEKVYAEEITTAWETGENLERVARYSMEDAKVTYELGKEFLPMEAQLSRLIGQSLWDVSRSSTGNLVEWFLLRKAYERNELAPNKPDEKELARRRQSYEGGYVKEPERGLWENIVYLDFRSLYPSIIITHNVSPDTLNREGCKEYDVAPQVGHRFCKDFPGFIPSLLGDLLEERQKIKKKMKATIDPIERKLLDYRQRAIKILANSYYGYYGYARARWYCKECAESVTAWGREYITMTIKEIEEKYGFKVIYSDTDGFFATIPGADAETVKKKAMEFLKYINAKLPGALELEYEGFYKRGFFVTKKKYAVIDEEGKITTRGLEIVRRDWSEIAKETQARVLEALLKDGDVEKAVRIVKEVTEKLSKYEVPPEKLVIHEQITRDLKDYKATGPHVAVAKRLAARGVKIRPGTVISYIVLKGSGRIGDRAIPFDEFDPTKHKYDAEYYIENQVLPAVERILRAFGYRKEDLRYQKTRQVGLSAWLKPKGT

SEQ ID NO: 3374 - protein, 774 aa, synthetic construct
MILDTDYITEDGKPVIRIFKKENGEFKIEYDRTFEPYFYALLKDDSAIEEVKKITAERHGTVVTVKRVEKVQKKFLGRPVEVWKLYFTHFQDKPAIFDKIREHPAVIDIYEYDIPPMKRYLIIKGLVPMEGDEELKMLAFDIETLYHEGEEFAEGPILMISYADEEGARVITWKNVDLPYVDVVSTEREMIKRFLRVVKEKDPDVLITYNGDNFDFAYLKKRCEKLGINFALGRDGSEPKIQRMGDRFAVEVKGRIHFDLYPVIRRTINLPTYTLEAVYEAVFGQPKEKVYAEEITTAWETGENLERVARYSMEDAKVTYELGKEFLPMEAQLSRLIGQSLWDVSRSSTGNLVEWFLLRKAYERNELAPNKPDEKELARRRQSYEGGYVKEPERGLWENIVYLDFRSLYPSIIITHNVSPDTLNREGCKEYDVAPQVGHRFCKDFPGFIPSLLGDLLEERQKIKKKMKATIDPIERKLLDYRQRAIKILANSYYGYYGYARARWYCKECAESVTAWGREYITMTIKEIEEKYGFKVIYSDTDGFFATIPGADAETVKKKAMEFLKYINAKLPGALELEYEGFYKRGFFVTKKKYAVIDEEGKITTRGLEIVRRDWSEIAKETQARVLEALLKDGDVEKAVRIVKEVTEKLSKYEVPPEKLVIHEQITRDLKDYKATGPHVAVAKRLAARGVKIRPGTVISYIVLKGSGRIGDRAIPFDEFDPTKHKYDAEYYIENQVLPAVERILRAFGYRKEDLRYQKTRQVGLSAWLKPKGT

SEQ ID NO: 3375 - protein, 774 aa, synthetic construct
MILDTDYITEDGKPVIRIFKKENGEFKIEYDRTFEPYFYALLKDDSAIEEVKKITAERHGTVVTVKRVEKVQKKFLGRPVEVWKLYFTHFQDKPAIFDKIREHPAVIDIYEYDIPPMKQYLIDKGLVPMEGDEELKMLAFDIETLYHEGEEFAEGPILMISYADEEGARVITWKNVDLPYVDVVSTEREMIKRFLRVVKEKDPDVLITYNGDNFDFAYLKKRCEKLGINFALGRDGSEPKIQRMGDRFAVEVKGRIHFDLYPVIRRTINLPTYTLEAVYEAVFGQPKEKVYAEEITTAWETGENLERVARYSMEDAKVTYELGKEFLPMEAQLSRLIGQSLWDVSRSSTGNLVEWFLLRKAYERNELAPNKPDEKELARRRQSYEGGYVKEPERGLWENIVYLDFRSLYPSIIITHNVSPDTLNREGCKEYDVAPQVGHRFCKDFPGFIPSLLGDLLEERQKIKKKMKATIDPIERKLLDYRQRAIKILANSYYGYYGYARARWYCKECAESVTAWGREYITMTIKEIEEKYGFKVIYSDTDGFFATIPGADAETVKKKAMEFLKYINAKLPGALELEYEGFYKRGFFVTKKKYAVIDEEGKITTRGLEIVRRDWSEIAKETQARVLEALLKDGDVEKAVRIVKEVTEKLSKYEVPPEKLVIHEQITRDLKDYKATGPHVAVAKRLAARGVKIRPGTVISYIVLKGSGRIGDRAIPFDEFDPTKHKYDAEYYIENQVLPAVERILRAFGYRKEDLRYQKTRQVGLSAWLKPKGT

SEQ ID NO: 3376 - protein, 774 aa, synthetic construct
MILDTDYITEDGKPVIRIFKKENGEFKIEYDRTFEPYFYALLKDDSAIEEVKKITAERHGTVVTVKRVEKVQKKFLGRPVEVWKLYFTHFQDKPAIFDKIREHPAVIDIYEYDIPPMKQYLIIKGLVPMEGDEELKMLAFDIETLYHEGEEFAEGPILMISYADEEGARVITWKNVDLPYVDVVSTEREMIKRFLRVVKEKDPDVLITYNGDNFDFAYLKKRCEKLGINFALGRDGSEPKIQRMGDRFAVEVKGRIHFDLYPVIRRTINLPTYTLEAVYEAVFGQPKEKVYAEEITTAWETGENLERVARYSMEDAKVTYELGKEFLPMEAQLSRLIGQSLWDVSRSSTGNLVEWFLLRKAYERNELAPNKPDEKELARRRQSYEGGYVKEPERGLWENIVYLDFRSLYPSIIITHNVSPDTLNREGCKEYDVAPQVGHRFCKDFPGFIPSLLGDLLEERQKIKKKMKATIDPIERKLLDYRQRAIKILANSYYGYYGYARARWYCKECAESVTAWGREYITMTIKEIEEKYGFKVIYSDTDGFFATIPGADAETVKKKAMEFLKYINAKLPGALELEYEGFYKRGFFVTKKKYAVIDEEGKITTRGLEIVRRDWSEIAKETQARVLEALLKDGDVEKAVRIVKEVTEKLSKYEVPPEKLVIHEQITRDLKDYKATGPHVAVAKRLAARGVKIRPGTVISYIVLKGSGRIGDRAIPFDEFDPTKHKYDAEYYIENQVLPAVERILRAFGYRKEDLRYQKTRQVGLSAWLKPKGT

SEQ ID NO: 3377 - protein, 774 aa, synthetic construct
MILDTDYITEDGKPVIRIFKKENGEFKIEYDRTFEPYFYALLKDDSAIEEVKKITAERHGTVVTVKRVEKVQKKFLGRPVEVWKLYFTHPQDVDAIRDKIREHPAVIDIYEYDIPFMKRYLIDKGLVPMEGDEELKMLAFDIETLYHEGEEFAEGPILMISYADEEGARVITWKNVDLPYVDVVSTEREMIKRFLRVVKEKDPDVLITYNGDNFDFAYLKKRCEKLGINFALGRDGSEPKIQRMGDRFAVEVKGRIHFDLYPVIRRTINLPTYTLEAVYEAVFGQPKEKVYAEEITTAWETGENLERVARYSMEDAKVTYELGKEFLPMEAQLSRLIGQSLWDVSRSSTGNLVEWFLLRKAYERNELAPNKPDEKELARRRQSYEGGYVKEPERGLWENIVYLDFRSLYPSIIITHNVSPDTLNREGCKEYDVAPQVGHRFCKDFPGFIPSLLGDLLEERQKIKKKMKATIDPIERKLLDYRQRAIKILANSYYGYYGYARARWYCKECAESVTAWGREYITMTIKEIEEKYGFKVIYSDTDGFFATIPGADAETVKKKAMEFLKYINAKLPGALELEYEGFYKRGFFVTKKKYAVIDEEGKITTRGLEIVRRDWSEIAKETQARVLEALLKDGDVEKAVRIVKEVTEKLSKYEVPPEKLVIHEQITRDLKDYKATGPHVAVAKRLAARGVKIRPGTVISYIVLKGSGRIGDRAIPFDEFDPTKHKYDAEYYIENQVLPAVERILRAFGYRKEDLRYQKTRQVGLSAWLKPKGT

SEQ ID NO: 3378 - protein, 774 aa, synthetic construct
MILDTDYITEDGKPVIRIFKKENGEFKIEYDRTFEPYFYALLKDDSAIEEVKKITAERHGTVVTVKRVEKVQKKFLGRPVEVWKLYFTHPQDVDAIRDKIREHPAVIDIYEYDIPFMKRYLIIKGLVPMEGDEELKMLAFDIETLYHEGEEFAEGPILMISYADEEGARVITWKNVDLPYVDVVSTEREMIKRFLRVVKEKDPDVLITYNGDNFDFAYLKKRCEKLGINFALGRDGSEPKIQRMGDRFAVEVKGRIHFDLYPVIRRTINLPTYTLEAVYEAVFGQPKEKVYAEEITTAWETGENLERVARYSMEDAKVTYELGKEFLPMEAQLSRLIGQSLWDVSRSSTGNLVEWFLLRKAYERNELAPNKPDEKELARRRQSYEGGYVKEPERGLWENIVYLDFRSLYPSIIITHNVSPDTLNREGCKEYDVAPQVGHRFCKDFPGFIPSLLGDLLEERQKIKKKMKATIDPIERKLLDYRQRAIKILANSYYGYYGYARARWYCKECAESVTAWGREYITMTIKEIEEKYGFKVIYSDTDGFFATIPGADAETVKKKAMEFLKYINAKLPGALELEYEGFYKRGFFVTKKKYAVIDEEGKITTRGLEIVRRDWSEIAKETQARVLEALLKDGDVEKAVRIVKEVTEKLSKYEVPPEKLVIHEQITRDLKDYKATGPHVAVAKRLAARGVKIRPGTVISYIVLKGSGRIGDRAIPFDEFDPTKHKYDAEYYIENQVLPAVERILRAFGYRKEDLRYQKTRQVGLSAWLKPKGT

SEQ ID NO: 3379 - protein, 774 aa, synthetic construct
MILDTDYITEDGKPVIRIFKKENGEFKIEYDRTFEPYFYALLKDDSAIEEVKKITAERHGTVVTVKRVEKVQKKFLGRPVEVWKLYFTHPQDVDAIRDKIREHPAVIDIYEYDIPPAKRYLIDKGLVPMEGDEELKMLAFDIETLYHEGEEFAEGPILMISYADEEGARVITWKNVDLPYVDVVSTEREMIKRFLRVVKEKDPDVLITYNGDNFDFAYLKKRCEKLGINFALGRDGSEPKIQRMGDRFAVEVKGRIHFDLYPVIRRTINLPTYTLEAVYEAVFGQPKEKVYAEEITTAWETGENLERVARYSMEDAKVTYELGKEFLPMEAQLSRLIGQSLWDVSRSSTGNLVEWFLLRKAYERNELAPNKPDEKELARRRQSYEGGYVKEPERGLWENIVYLDFRSLYPSIIITHNVSPDTLNREGCKEYDVAPQVGHRFCKDFPGFIPSLLGDLLEERQKIKKKMKATIDPIERKLLDYRQRAIKILANSYYGYYGYARARWYCKECAESVTAWGREYITMTIKEIEEKYGFKVIYSDTDGFFATIPGADAETVKKKAMEFLKYINAKLPGALELEYEGFYKRGFFVTKKKYAVIDEEGKITTRGLEIVRRDWSEIAKETQARVLEALLKDGDVEKAVRIVKEVTEKLSKYEVPPEKLVIHEQITRDLKDYKATGPHVAVAKRLAARGVKIRPGTVISYIVLKGSGRIGDRAIPFDEFDPTKHKYDAEYYIENQVLPAVERILRAFGYRKEDLRYQKTRQVGLSAWLKPKGT

SEQ ID NO: 3380 - protein, 774 aa, synthetic construct
MILDTDYITEDGKPVIRIFKKENGEFKIEYDRTFEPYFYALLKDDSAIEEVKKITAERHGTVVTVKRVEKVQKKFLGRPVEVWKLYFTHPQDVDAIRDKIREHPAVIDIYEYDIPPMKRYLIDKGLVPMEGDEELKMLAFDIETLYHEGEEFAEGPILMISYADEEGARVITWKNVDLPYVDVVSTEREMIKRFLRVVKEKDPDVLITYNGDNFDFAYLKKRCEKLGINFALGRDGSEPKIQRMGDRFAVEVKGRIHFDLYPVIRRTINLPTYTLEAVYEAVFGQPKEKVYAEEITTAWETGENLERVARYSMEDAKVTYELGKEFLPMEAQLSRLIGQSLWDVSRSSTGNLVEWFLLRKAYERNELAPNKPDEKELARRRQSYEGGYVKEPERGLWENIVYLDFRSLYPSIIITHNVSPDTLNREGCKEYDVAPQVGHRFCKDFPGFIPSLLGDLLEERQKIKKKMKATIDPIERKLLDYRQRAIKILANSYYGYYGYARARWYCKECAESVTAWGREYITMTIKEIEEKYGFKVIYSDTDGFFATIPGADAETVKKKAMEFLKYINAKLPGALELEYEGFYKRGFFVTKKKYAVIDEEGKITTRGLEIVRRDWSEIAKETQARVLEALLKDGDVEKAVRIVKEVTEKLSKYEVPPEKLVIHEQITRDLKDYKATGPHVAVAKRLAARGVKIRPGTVISYIVLKGSGRIGDRAIPFDEFDPTKHKYDAEYYIENQVLPAVERILRAFGYRKEDLRYQKTRQVGLSAWLKPKGT

SEQ ID NO: 3381 - protein, 774 aa, synthetic construct
MILDTDYITEDGKPVIRIFKKENGEFKIEYDRTFEPYFYALLKDDSAIEEVKKITAERHGTVVTVKRVEKVQKKFLGRPVEVWKLYFTHPQDVDAIFDKIREHPAVIDIYEYDIPFMKRYLIIKGLVPMEGDEELKMLAFDIETLYHEGEEFAEGPILMISYADEEGARVITWKNVDLPYVDVVSTEREMIKRFLRVVKEKDPDVLITYNGDNFDFAYLKKRCEKLGINFALGRDGSEPKIQRMGDRFAVEVKGRIHFDLYPVIRRTINLPTYTLEAVYEAVFGQPKEKVYAEEITTAWETGENLERVARYSMEDAKVTYELGKEFLPMEAQLSRLIGQSLWDVSRSSTGNLVEWFLLRKAYERNELAPNKPDEKELARRRQSYEGGYVKEPERGLWENIVYLDFRSLYPSIIITHNVSPDTLNREGCKEYDVAPQVGHRFCKDFPGFIPSLLGDLLEERQKIKKKMKATIDPIERKLLDYRQRAIKILANSYYGYYGYARARWYCKECAESVTAWGREYITMTIKEIEEKYGFKVIYSDTDGFFATIPGADAETVKKKAMEFLKYINAKLPGALELEYEGFYKRGFFVTKKKYAVIDEEGKITTRGLEIVRRDWSEIAKETQARVLEALLKDGDVEKAVRIVKEVTEKLSKYEVPPEKLVIHEQITRDLKDYKATGPHVAVAKRLAARGVKIRPGTVISYIVLKGSGRIGDRAIPFDEFDPTKHKYDAEYYIENQVLPAVERILRAFGYRKEDLRYQKTRQVGLSAWLKPKGT

SEQ ID NO: 3382 - protein, 774 aa, synthetic construct
MILDTDYITEDGKPVIRIFKKENGEFKIEYDRTFEPYFYALLKDDSAIEEVKKITAERHGTVVTVKRVEKVQKKFLGRPVEVWKLYFTHPQDVPAIFDKIREHPAVIDIYEYDIPFMKRYLIDKGLVPMEGDEELKMLAFDIETLYHEGEEFAEGPILMISYADEEGARVITWKNVDLPYVDVVSTEREMIKRFLRVVKEKDPDVLITYNGDNFDFAYLKKRCEKLGINFALGRDGSEPKIQRMGDRFAVEVKGRIHFDLYPVIRRTINLPTYTLEAVYEAVFGQPKEKVYAEEITTAWETGENLERVARYSMEDAKVTYELGKEFLPMEAQLSRLIGQSLWDVSRSSTGNLVEWFLLRKAYERNELAPNKPDEKELARRRQSYEGGYVKEPERGLWENIVYLDFRSLYPSIIITHNVSPDTLNREGCKEYDVAPQVGHRFCKDFPGFIPSLLGDLLEERQKIKKKMKATIDPIERKLLDYRQRAIKILANSYYGYYGYARARWYCKECAESVTAWGREYITMTIKEIEEKYGFKVIYSDTDGFFATIPGADAETVKKKAMEFLKYINAKLPGALELEYEGFYKRGFFVTKKKYAVIDEEGKITTRGLEIVRRDWSEIAKETQARVLEALLKDGDVEKAVRIVKEVTEKLSKYEVPPEKLVIHEQITRDLKDYKATGPHVAVAKRLAARGVKIRPGTVISYIVLKGSGRIGDRAIPFDEFDPTKHKYDAEYYIENQVLPAVERILRAFGYRKEDLRYQKTRQVGLSAWLKPKGT

SEQ ID NO: 3383 - protein, 774 aa, synthetic construct
MILDTDYITEDGKPVIRIFKKENGEFKIEYDRTFEPYFYALLKDDSAIEEVKKITAERHGTVVTVKRVEKVQKKFLGRPVEVWKLYFTHPQDVPAIFDKIREHPAVIDIYEYDIPFMKRYLIIKGLVPMEGDEELKMLAFDIETLYHEGEEFAEGPILMISYADEEGARVITWKNVDLPYVDVVSTEREMIKRFLRVVKEKDPDVLITYNGDNFDFAYLKKRCEKLGINFALGRDGSEPKIQRMGDRFAVEVKGRIHFDLYPVIRRTINLPTYTLEAVYEAVFGQPKEKVYAEEITTAWETGENLERVARYSMEDAKVTYELGKEFLPMEAQLSRLIGQSLWDVSRSSTGNLVEWFLLRKAYERNELAPNKPDEKELARRRQSYEGGYVKEPERGLWENIVYLDFRSLYPSIIITHNVSPDTLNREGCKEYDVAPQVGHRFCKDFPGFIPSLLGDLLEERQKIKKKMKATIDPIERKLLDYRQRAIKILANSYYGYYGYARARWYCKECAESVTAWGREYITMTIKEIEEKYGFKVIYSDTDGFFATIPGADAETVKKKAMEFLKYINAKLPGALELEYEGFYKRGFFVTKKKYAVIDEEGKITTRGLEIVRRDWSEIAKETQARVLEALLKDGDVEKAVRIVKEVTEKLSKYEVPPEKLVIHEQITRDLKDYKATGPHVAVAKRLAARGVKIRPGTVISYIVLKGSGRIGDRAIPFDEFDPTKHKYDAEYYIENQVLPAVERILRAFGYRKEDLRYQKTRQVGLSAWLKPKGT

SEQ ID NO: 3384 - protein, 774 aa, synthetic construct
MILDTDYITEDGKPVIRIFKKENGEFKIEYDRTFEPYFYALLKDDSAIEEVKKITAERHGTVVTVKRVEKVQKKFLGRPVEVWKLYFTHPQDVPAIFDKIREHPAVIDIYEYDIPFMKQYLIDKGLVPMEGDEELKMLAFDIETLYHEGEEFAEGPILMISYADEEGARVITWKNVDLPYVDVVSTEREMIKRFLRVVKEKDPDVLITYNGDNFDFAYLKKRCEKLGINFALGRDGSEPKIQRMGDRFAVEVKGRIHFDLYPVIRRTINLPTYTLEAVYEAVFGQPKEKVYAEEITTAWETGENLERVARYSMEDAKVTYELGKEFLPMEAQLSRLIGQSLWDVSRSSTGNLVEWFLLRKAYERNELAPNKPDEKELARRRQSYEGGYVKEPERGLWENIVYLDFRSLYPSIIITHNVSPDTLNREGCKEYDVAPQVGHRFCKDFPGFIPSLLGDLLEERQKIKKKMKATIDPIERKLLDYRQRAIKILANSYYGYYGYARARWYCKECAESVTAWGREYITMTIKEIEEKYGFKVIYSDTDGFFATIPGADAETVKKKAMEFLKYINAKLPGALELEYEGFYKRGFFVTKKKYAVIDEEGKITTRGLEIVRRDWSEIAKETQARVLEALLKDGDVEKAVRIVKEVTEKLSKYEVPPEKLVIHEQITRDLKDYKATGPHVAVAKRLAARGVKIRPGTVISYIVLKGSGRIGDRAIPFDEFDPTKHKYDAEYYIENQVLPAVERILRAFGYRKEDLRYQKTRQVGLSAWLKPKGT

SEQ ID NO: 3385 - protein, 774 aa, synthetic construct
MILDTDYITEDGKPVIRIFKKENGEFKIEYDRTFEPYFYALLKDDSAIEEVKKITAERHGTVVTVKRVEKVQKKFLGRPVEVWKLYFTHPQDVPAIFDKIREHPAVIDIYEYDIPFMKQYLIIKGLVPMEGDEELKMLAFDIETLYHEGEEFAEGPILMISYADEEGARVITWKNVDLPYVDVVSTEREMIKRFLRVVKEKDPDVLITYNGDNFDFAYLKKRCEKLGINFALGRDGSEPKIQRMGDRFAVEVKGRIHFDLYPVIRRTINLPTYTLEAVYEAVFGQPKEKVYAEEITTAWETGENLERVARYSMEDAKVTYELGKEFLPMEAQLSRLIGQSLWDVSRSSTGNLVEWFLLRKAYERNELAPNKPDEKELARRRQSYEGGYVKEPERGLWENIVYLDFRSLYPSIIITHNVSPDTLNREGCKEYDVAPQVGHRFCKDFPGFIPSLLGDLLEERQKIKKKMKATIDPIERKLLDYRQRAIKILANSYYGYYGYARARWYCKECAESVTAWGREYITMTIKEIEEKYGFKVIYSDTDGFFATIPGADAETVKKKAMEFLKYINAKLPGALELEYEGFYKRGFFVTKKKYAVIDEEGKITTRGLEIVRRDWSEIAKETQARVLEALLKDGDVEKAVRIVKEVTEKLSKYEVPPEKLVIHEQITRDLKDYKATGPHVAVAKRLAARGVKIRPGTVISYIVLKGSGRIGDRAIPFDEFDPTKHKYDAEYYIENQVLPAVERILRAFGYRKEDLRYQKTRQVGLSAWLKPKGT

SEQ ID NO: 3386 - protein, 774 aa, synthetic construct
MILDTDYITEDGKPVIRIFKKENGEFKIEYDRTFEPYFYALLKDDSAIEEVKKITAERHGTVVTVKRVEKVQKKFLGRPVEVWKLYFTHPQDVPAIFDKIREHPAVIDIYEYDIPFAKRYLIIKGLVPMEGDEELKMLAFDIETLYHEGEEFAEGPILMISYADEEGARVITWKNVDLPYVDVVSTEREMIKRFLRVVKEKDPDVLITYNGDNFDFAYLKKRCEKLGINFALGRDGSEPKIQRMGDRFAVEVKGRIHFDLYPVIRRTINLPTYTLEAVYEAVFGQPKEKVYAEEITTAWETGENLERVARYSMEDAKVTYELGKEFLPMEAQLSRLIGQSLWDVSRSSTGNLVEWFLLRKAYERNELAPNKPDEKELARRRQSYEGGYVKEPERGLWENIVYLDFRSLYPSIIITHNVSPDTLNREGCKEYDVAPQVGHRFCKDFPGFIPSLLGDLLEERQKIKKKMKATIDPIERKLLDYRQRAIKILANSYYGYYGYARARWYCKECAESVTAWGREYITMTIKEIEEKYGFKVIYSDTDGFFATIPGADAETVKKKAMEFLKYINAKLPGALELEYEGFYKRGFFVTKKKYAVIDEEGKITTRGLEIVRRDWSEIAKETQARVLEALLKDGDVEKAVRIVKEVTEKLSKYEVPPEKLVIHEQITRDLKDYKATGPHVAVAKRLAARGVKIRPGTVISYIVLKGSGRIGDRAIPFDEFDPTKHKYDAEYYIENQVLPAVERILRAFGYRKEDLRYQKTRQVGLSAWLKPKGT

SEQ ID NO: 3387 - protein, 774 aa, synthetic construct
MILDTDYITEDGKPVIRIFKKENGEFKIEYDRTFEPYFYALLKDDSAIEEVKKITAERHGTVVTVKRVEKVQKKFLGRPVEVWKLYFTHPQDVPAIFDKIREHPAVIDIYEYDIPPAKRYLIDKGLVPMEGDEELKMLAFDIETLYHEGEEFAEGPILMISYADEEGARVITWKNVDLPYVDVVSTEREMIKRFLRVVKEKDPDVLITYNGDNFDFAYLKKRCEKLGINFALGRDGSEPKIQRMGDRFAVEVKGRIHFDLYPVIRRTINLPTYTLEAVYEAVFGQPKEKVYAEEITTAWETGENLERVARYSMEDAKVTYELGKEFLPMEAQLSRLIGQSLWDVSRSSTGNLVEWFLLRKAYERNELAPNKPDEKELARRRQSYEGGYVKEPERGLWENIVYLDFRSLYPSIIITHNVSPDTLNREGCKEYDVAPQVGHRFCKDFPGFIPSLLGDLLEERQKIKKKMKATIDPIERKLLDYRQRAIKILANSYYGYYGYARARWYCKECAESVTAWGREYITMTIKEIEEKYGFKVIYSDTDGFFATIPGADAETVKKKAMEFLKYINAKLPGALELEYEGFYKRGFFVTKKKYAVIDEEGKITTRGLEIVRRDWSEIAKETQARVLEALLKDGDVEKAVRIVKEVTEKLSKYEVPPEKLVIHEQITRDLKDYKATGPHVAVAKRLAARGVKIRPGTVISYIVLKGSGRIGDRAIPFDEFDPTKHKYDAEYYIENQVLPAVERILRAFGYRKEDLRYQKTRQVGLSAWLKPKGT

SEQ ID NO: 3388 - protein, 774 aa, synthetic construct
MILDTDYITEDGKPVIRIFKKENGEFKIEYDRTFEPYFYALLKDDSAIEEVKKITAERHGTVVTVKRVEKVQKKFLGRPVEVWKLYFTHPQDVPAIFDKIREHPAVIDIYEYDIPPMKRYLIDKGLVPMEGDEELKMLAFDIETLYHEGEEFAEGPILMISYADEEGARVITWKNVDLPYVDVVSTEREMIKRFLRVVKEKDPDVLITYNGDNFDFAYLKKRCEKLGINFALGRDGSEPKIQRMGDRFAVEVKGRIHFDLYPVIRRTINLPTYTLEAVYEAVFGQPKEKVYAEEITTAWETGENLERVARYSMEDAKVTYELGKEFLPMEAQLSRLIGQSLWDVSRSSTGNLVEWFLLRKAYERNELAPNKPDEKELARRRQSYEGGYVKEPERGLWENIVYLDFRSLYPSIIITHNVSPDTLNREGCKEYDVAPQVGHRFCKDFPGFIPSLLGDLLEERQKIKKKMKATIDPIERKLLDYRQRAIKILANSYYGYYGYARARWYCKECAESVTAWGREYITMTIKEIEEKYGFKVIYSDTDGFFATIPGADAETVKKKAMEFLKYINAKLPGALELEYEGFYKRGFFVTKKKYAVIDEEGKITTRGLEIVRRDWSEIAKETQARVLEALLKDGDVEKAVRIVKEVTEKLSKYEVPPEKLVIHEQITRDLKDYKATGPHVAVAKRLAARGVKIRPGTVISYIVLKGSGRIGDRAIPFDEFDPTKHKYDAEYYIENQVLPAVERILRAFGYRKEDLRYQKTRQVGLSAWLKPKGT

SEQ ID NO: 3389 - protein, 774 aa, synthetic construct
MILDTDYITEDGKPVIRIFKKENGEFKIEYDRTFEPYFYALLKDDSAIEEVKKITAERHGTVVTVKRVEKVQKKFLGRPVEVWKLYFTHPQDVPAIFDKIREHPAVIDIYEYDIPPMKRYLIIKGLVPMEGDEELKMLAFDIETLYHEGEEFAEGPILMISYADEEGARVITWKNVDLPYVDVVSTEREMIKRFLRVVKEKDPDVLITYNGDNFDFAYLKKRCEKLGINFALGRDGSEPKIQRMGDRFAVEVKGRIHFDLYPVIRRTINLPTYTLEAVYEAVFGQPKEKVYAEEITTAWETGENLERVARYSMEDAKVTYELGKEFLPMEAQLSRLIGQSLWDVSRSSTGNLVEWFLLRKAYERNELAPNKPDEKELARRRQSYEGGYVKEPERGLWENIVYLDFRSLYPSIIITHNVSPDTLNREGCKEYDVAPQVGHRFCKDFPGFIPSLLGDLLEERQKIKKKMKATIDPIERKLLDYRQRAIKILANSYYGYYGYARARWYCKECAESVTAWGREYITMTIKEIEEKYGFKVIYSDTDGFFATIPGADAETVKKKAMEFLKYINAKLPGALELEYEGFYKRGFFVTKKKYAVIDEEGKITTRGLEIVRRDWSEIAKETQARVLEALLKDGDVEKAVRIVKEVTEKLSKYEVPPEKLVIHEQITRDLKDYKATGPHVAVAKRLAARGVKIRPGTVISYIVLKGSGRIGDRAIPFDEFDPTKHKYDAEYYIENQVLPAVERILRAFGYRKEDLRYQKTRQVGLSAWLKPKGT

SEQ ID NO: 3390 - protein, 774 aa, synthetic construct
MILDTDYITEDGKPVIRIFKKENGEFKIEYDRTFEPYFYALLKDDSAIEEVKKITAERHGTVVTVKRVEKVQKKFLGRPVEVWKLYFTHPQDVPAIFDKIREHPAVIDIYEYDIPPAKRYLIIKGLVPMEGDEELKMLAFDIETLYHEGEEFAEGPILMISYADEEGARVITWKNVDLPYVDVVSTEREMIKRFLRVVKEKDPDVLITYNGDNFDFAYLKKRCEKLGINFALGRDGSEPKIQRMGDRFAVEVKGRIHFDLYPVIRRTINLPTYTLEAVYEAVFGQPKEKVYAEEITTAWETGENLERVARYSMEDAKVTYELGKEFLPMEAQLSRLIGQSLWDVSRSSTGNLVEWFLLRKAYERNELAPNKPDEKELARRRQSYEGGYVKEPERGLWENIVYLDFRSLYPSIIITHNVSPDTLNREGCKEYDVAPQVGHRFCKDFPGFIPSLLGDLLEERQKIKKKMKATIDPIERKLLDYRQRAIKILANSYYGYYGYARARWYCKECAESVTAWGREYITMTIKEIEEKYGFKVIYSDTDGFFATIPGADAETVKKKAMEFLKYINAKLPGALELEYEGFYKRGFFVTKKKYAVIDEEGKITTRGLEIVRRDWSEIAKETQARVLEALLKDGDVEKAVRIVKEVTEKLSKYEVPPEKLVIHEQITRDLKDYKATGPHVAVAKRLAARGVKIRPGTVISYIVLKGSGRIGDRAIPFDEFDPTKHKYDAEYYIENQVLPAVERILRAFGYRKEDLRYQKTRQVGLSAWLKPKGT

SEQ ID NO: 3391 - protein, 774 aa, synthetic construct
MILDTDYITEDGKPVIRIFKKENGEFKIEYDRTFEPYFYALLKDDSAIEEVKKITAERHGTVVTVKRVEKVQKKFLGRPVEVWKLYFTHPQDVPAIRDKIREHPAVIDIYEYDIPFAKQYLIIKGLVPMEGDEELKMLAFDIETLYHEGEEFAEGPILMISYADEEGARVITWKNVDLPYVDVVSTEREMIKRFLRVVKEKDPDVLITYNGDNFDFAYLKKRCEKLGINFALGRDGSEPKIQRMGDRFAVEVKGRIHFDLYPVIRRTINLPTYTLEAVYEAVFGQPKEKVYAEEITTAWETGENLERVARYSMEDAKVTYELGKEFLPMEAQLSRLIGQSLWDVSRSSTGNLVEWFLLRKAYERNELAPNKPDEKELARRRQSYEGGYVKEPERGLWENIVYLDFRSLYPSIIITHNVSPDTLNREGCKEYDVAPQVGHRFCKDFPGFIPSLLGDLLEERQKIKKKMKATIDPIERKLLDYRQRAIKILANSYYGYYGYARARWYCKECAESVTAWGREYITMTIKEIEEKYGFKVIYSDTDGFFATIPGADAETVKKKAMEFLKYINAKLPGALELEYEGFYKRGFFVTKKKYAVIDEEGKITTRGLEIVRRDWSEIAKETQARVLEALLKDGDVEKAVRIVKEVTEKLSKYEVPPEKLVIHEQITRDLKDYKATGPHVAVAKRLAARGVKIRPGTVISYIVLKGSGRIGDRAIPFDEFDPTKHKYDAEYYIENQVLPAVERILRAFGYRKEDLRYQKTRQVGLSAWLKPKGT

SEQ ID NO: 3392 - protein, 774 aa, synthetic construct
MILDTDYITEDGKPVIRIFKKENGEFKIEYDRTFEPYFYALLKDDSAIEEVKKITAERHGTVVTVKRVEKVQKKFLGRPVEVWKLYFTHPQDKPAIRDKIREHPAVIDIYEYDIPFMKRYLIDKGLVPMEGDEELKMLAFDIETLYHEGEEFAEGPILMISYADEEGARVITWKNVDLPYVDVVSTEREMIKRFLRVVKEKDPDVLITYNGDNFDFAYLKKRCEKLGINFALGRDGSEPKIQRMGDRFAVEVKGRIHFDLYPVIRRTINLPTYTLEAVYEAVFGQPKEKVYAEEITTAWETGENLERVARYSMEDAKVTYELGKEFLPMEAQLSRLIGQSLWDVSRSSTGNLVEWFLLRKAYERNELAPNKPDEKELARRRQSYEGGYVKEPERGLWENIVYLDFRSLYPSIIITHNVSPDTLNREGCKEYDVAPQVGHRFCKDFPGFIPSLLGDLLEERQKIKKKMKATIDPIERKLLDYRQRAIKILANSYYGYYGYARARWYCKECAESVTAWGREYITMTIKEIEEKYGFKVIYSDTDGFFATIPGADAETVKKKAMEFLKYINAKLPGALELEYEGFYKRGFFVTKKKYAVIDEEGKITTRGLEIVRRDWSEIAKETQARVLEALLKDGDVEKAVRIVKEVTEKLSKYEVPPEKLVIHEQITRDLKDYKATGPHVAVAKRLAARGVKIRPGTVISYIVLKGSGRIGDRAIPFDEFDPTKHKYDAEYYIENQVLPAVERILRAFGYRKEDLRYQKTRQVGLSAWLKPKGT

SEQ ID NO: 3393 - protein, 774 aa, synthetic construct
MILDTDYITEDGKPVIRIFKKENGEFKIEYDRTFEPYFYALLKDDSAIEEVKKITAERHGTVVTVKRVEKVQKKFLGRPVEVWKLYFTHPQDKPAIRDKIREHPAVIDIYEYDIPFMKRYLIIKGLVPMEGDEELKMLAFDIETLYHEGEEFAEGPILMISYADEEGARVITWKNVDLPYVDVVSTEREMIKRFLRVVKEKDPDVLITYNGDNFDFAYLKKRCEKLGINFALGRDGSEPKIQRMGDRFAVEVKGRIHFDLYPVIRRTINLPTYTLEAVYEAVFGQPKEKVYAEEITTAWETGENLERVARYSMEDAKVTYELGKEFLPMEAQLSRLIGQSLWDVSRSSTGNLVEWFLLRKAYERNELAPNKPDEKELARRRQSYEGGYVKEPERGLWENIVYLDFRSLYPSIIITHNVSPDTLNREGCKEYDVAPQVGHRFCKDFPGFIPSLLGDLLEERQKIKKKMKATIDPIERKLLDYRQRAIKILANSYYGYYGYARARWYCKECAESVTAWGREYITMTIKEIEEKYGFKVIYSDTDGFFATIPGADAETVKKKAMEFLKYINAKLPGALELEYEGFYKRGFFVTKKKYAVIDEEGKITTRGLEIVRRDWSEIAKETQARVLEALLKDGDVEKAVRIVKEVTEKLSKYEVPPEKLVIHEQITRDLKDYKATGPHVAVAKRLAARGVKIRPGTVISYIVLKGSGRIGDRAIPFDEFDPTKHKYDAEYYIENQVLPAVERILRAFGYRKEDLRYQKTRQVGLSAWLKPKGT

SEQ ID NO: 3394 - protein, 774 aa, synthetic construct
MILDTDYITEDGKPVIRIFKKENGEFKIEYDRTFEPYFYALLKDDSAIEEVKKITAERHGTVVTVKRVEKVQKKFLGRPVEVWKLYFTHPQDKPAIRDKIREHPAVIDIYEYDIPFMKQYLIDKGLVPMEGDEELKMLAFDIETLYHEGEEFAEGPILMISYADEEGARVITWKNVDLPYVDVVSTEREMIKRFLRVVKEKDPDVLITYNGDNFDFAYLKKRCEKLGINFALGRDGSEPKIQRMGDRFAVEVKGRIHFDLYPVIRRTINLPTYTLEAVYEAVFGQPKEKVYAEEITTAWETGENLERVARYSMEDAKVTYELGKEFLPMEAQLSRLIGQSLWDVSRSSTGNLVEWFLLRKAYERNELAPNKPDEKELARRRQSYEGGYVKEPERGLWENIVYLDFRSLYPSIIITHNVSPDTLNREGCKEYDVAPQVGHRFCKDFPGFIPSLLGDLLEERQKIKKKMKATIDPIERKLLDYRQRAIKILANSYYGYYGYARARWYCKECAESVTAWGREYITMTIKEIEEKYGFKVIYSDTDGFFATIPGADAETVKKKAMEFLKYINAKLPGALELEYEGFYKRGFFVTKKKYAVIDEEGKITTRGLEIVRRDWSEIAKETQARVLEALLKDGDVEKAVRIVKEVTEKLSKYEVPPEKLVIHEQITRDLKDYKATGPHVAVAKRLAARGVKIRPGTVISYIVLKGSGRIGDRAIPFDEFDPTKHKYDAEYYIENQVLPAVERILRAFGYRKEDLRYQKTRQVGLSAWLKPKGT

SEQ ID NO: 3395 - protein, 774 aa, synthetic construct
MILDTDYITEDGKPVIRIFKKENGEFKIEYDRTFEPYFYALLKDDSAIEEVKKITAERHGTVVTVKRVEKVQKKFLGRPVEVWKLYFTHPQDKPAIRDKIREHPAVIDIYEYDIPFMKQYLIIKGLVPMEGDEELKMLAFDIETLYHEGEEFAEGPILMISYADEEGARVITWKNVDLPYVDVVSTEREMIKRFLRVVKEKDPDVLITYNGDNFDFAYLKKRCEKLGINFALGRDGSEPKIQRMGDRFAVEVKGRIHFDLYPVIRRTINLPTYTLEAVYEAVFGQPKEKVYAEEITTAWETGENLERVARYSMEDAKVTYELGKEFLPMEAQLSRLIGQSLWDVSRSSTGNLVEWFLLRKAYERNELAPNKPDEKELARRRQSYEGGYVKEPERGLWENIVYLDFRSLYPSIIITHNVSPDTLNREGCKEYDVAPQVGHRFCKDFPGFIPSLLGDLLEERQKIKKKMKATIDPIERKLLDYRQRAIKILANSYYGYYGYARARWYCKECAESVTAWGREYITMTIKEIEEKYGFKVIYSDTDGFFATIPGADAETVKKKAMEFLKYINAKLPGALELEYEGFYKRGFFVTKKKYAVIDEEGKITTRGLEIVRRDWSEIAKETQARVLEALLKDGDVEKAVRIVKEVTEKLSKYEVPPEKLVIHEQITRDLKDYKATGPHVAVAKRLAARGVKIRPGTVISYIVLKGSGRIGDRAIPFDEFDPTKHKYDAEYYIENQVLPAVERILRAFGYRKEDLRYQKTRQVGLSAWLKPKGT

SEQ ID NO: 3396 - protein, 774 aa, synthetic construct
MILDTDYITEDGKPVIRIFKKENGEFKIEYDRTFEPYFYALLKDDSAIEEVKKITAERHGTVVTVKRVEKVQKKFLGRPVEVWKLYFTHPQDKPAIRDKIREHPAVIDIYEYDIPPAKRYLIDKGLVPMEGDEELKMLAFDIETLYHEGEEFAEGPILMISYADEEGARVITWKNVDLPYVDVVSTEREMIKRFLRVVKEKDPDVLITYNGDNFDFAYLKKRCEKLGINFALGRDGSEPKIQRMGDRFAVEVKGRIHFDLYPVIRRTINLPTYTLEAVYEAVFGQPKEKVYAEEITTAWETGENLERVARYSMEDAKVTYELGKEFLPMEAQLSRLIGQSLWDVSRSSTGNLVEWFLLRKAYERNELAPNKPDEKELARRRQSYEGGYVKEPERGLWENIVYLDFRSLYPSIIITHNVSPDTLNREGCKEYDVAPQVGHRFCKDFPGFIPSLLGDLLEERQKIKKKMKATIDPIERKLLDYRQRAIKILANSYYGYYGYARARWYCKECAESVTAWGREYITMTIKEIEEKYGFKVIYSDTDGFFATIPGADAETVKKKAMEFLKYINAKLPGALELEYEGFYKRGFFVTKKKYAVIDEEGKITTRGLEIVRRDWSEIAKETQARVLEALLKDGDVEKAVRIVKEVTEKLSKYEVPPEKLVIHEQITRDLKDYKATGPHVAVAKRLAARGVKIRPGTVISYIVLKGSGRIGDRAIPFDEFDPTKHKYDAEYYIENQVLPAVERILRAFGYRKEDLRYQKTRQVGLSAWLKPKGT

SEQ ID NO: 3397 - protein, 774 aa, synthetic construct
MILDTDYITEDGKPVIRIFKKENGEFKIEYDRTFEPYFYALLKDDSAIEEVKKITAERHGTVVTVKRVEKVQKKFLGRPVEVWKLYFTHPQDKPAIRDKIREHPAVIDIYEYDIPPMKRYLIDKGLVPMEGDEELKMLAFDIETLYHEGEEFAEGPILMISYADEEGARVITWKNVDLPYVDVVSTEREMIKRFLRVVKEKDPDVLITYNGDNFDFAYLKKRCEKLGINFALGRDGSEPKIQRMGDRFAVEVKGRIHFDLYPVIRRTINLPTYTLEAVYEAVFGQPKEKVYAEEITTAWETGENLERVARYSMEDAKVTYELGKEFLPMEAQLSRLIGQSLWDVSRSSTGNLVEWFLLRKAYERNELAPNKPDEKELARRRQSYEGGYVKEPERGLWENIVYLDFRSLYPSIIITHNVSPDTLNREGCKEYDVAPQVGHRFCKDFPGFIPSLLGDLLEERQKIKKKMKATIDPIERKLLDYRQRAIKILANSYYGYYGYARARWYCKECAESVTAWGREYITMTIKEIEEKYGFKVIYSDTDGFFATIPGADAETVKKKAMEFLKYINAKLPGALELEYEGFYKRGFFVTKKKYAVIDEEGKITTRGLEIVRRDWSEIAKETQARVLEALLKDGDVEKAVRIVKEVTEKLSKYEVPPEKLVIHEQITRDLKDYKATGPHVAVAKRLAARGVKIRPGTVISYIVLKGSGRIGDRAIPFDEFDPTKHKYDAEYYIENQVLPAVERILRAFGYRKEDLRYQKTRQVGLSAWLKPKGT

SEQ ID NO: 3398 - protein, 774 aa, synthetic construct
MILDTDYITEDGKPVIRIFKKENGEFKIEYDRTFEPYFYALLKDDSAIEEVKKITAERHGTVVTVKRVEKVQKKFLGRPVEVWKLYFTHPQDKPAIRDKIREHPAVIDIYEYDIPPMKQYLIIKGLVPMEGDEELKMLAFDIETLYHEGEEFAEGPILMISYADEEGARVITWKNVDLPYVDVVSTEREMIKRFLRVVKEKDPDVLITYNGDNFDFAYLKKRCEKLGINFALGRDGSEPKIQRMGDRFAVEVKGRIHFDLYPVIRRTINLPTYTLEAVYEAVFGQPKEKVYAEEITTAWETGENLERVARYSMEDAKVTYELGKEFLPMEAQLSRLIGQSLWDVSRSSTGNLVEWFLLRKAYERNELAPNKPDEKELARRRQSYEGGYVKEPERGLWENIVYLDFRSLYPSIIITHNVSPDTLNREGCKEYDVAPQVGHRFCKDFPGFIPSLLGDLLEERQKIKKKMKATIDPIERKLLDYRQRAIKILANSYYGYYGYARARWYCKECAESVTAWGREYITMTIKEIEEKYGFKVIYSDTDGFFATIPGADAETVKKKAMEFLKYINAKLPGALELEYEGFYKRGFFVTKKKYAVIDEEGKITTRGLEIVRRDWSEIAKETQARVLEALLKDGDVEKAVRIVKEVTEKLSKYEVPPEKLVIHEQITRDLKDYKATGPHVAVAKRLAARGVKIRPGTVISYIVLKGSGRIGDRAIPFDEFDPTKHKYDAEYYIENQVLPAVERILRAFGYRKEDLRYQKTRQVGLSAWLKPKGT

SEQ ID NO: 3399 - protein, 774 aa, synthetic construct
MILDTDYITEDGKPVIRIFKKENGEFKIEYDRTFEPYFYALLKDDSAIEEVKKITAERHGTVVTVKRVEKVQKKFLGRPVEVWKLYFTHPQDKPAIRDKIREHPAVIDIYEYDIPPAKQYLIIKGLVPMEGDEELKMLAFDIETLYHEGEEFAEGPILMISYADEEGARVITWKNVDLPYVDVVSTEREMIKRFLRVVKEKDPDVLITYNGDNFDFAYLKKRCEKLGINFALGRDGSEPKIQRMGDRFAVEVKGRIHFDLYPVIRRTINLPTYTLEAVYEAVFGQPKEKVYAEEITTAWETGENLERVARYSMEDAKVTYELGKEFLPMEAQLSRLIGQSLWDVSRSSTGNLVEWFLLRKAYERNELAPNKPDEKELARRRQSYEGGYVKEPERGLWENIVYLDFRSLYPSIIITHNVSPDTLNREGCKEYDVAPQVGHRFCKDFPGFIPSLLGDLLEERQKIKKKMKATIDPIERKLLDYRQRAIKILANSYYGYYGYARARWYCKECAESVTAWGREYITMTIKEIEEKYGFKVIYSDTDGFFATIPGADAETVKKKAMEFLKYINAKLPGALELEYEGFYKRGFFVTKKKYAVIDEEGKITTRGLEIVRRDWSEIAKETQARVLEALLKDGDVEKAVRIVKEVTEKLSKYEVPPEKLVIHEQITRDLKDYKATGPHVAVAKRLAARGVKIRPGTVISYIVLKGSGRIGDRAIPFDEFDPTKHKYDAEYYIENQVLPAVERILRAFGYRKEDLRYQKTRQVGLSAWLKPKGT

SEQ ID NO: 3400 - protein, 774 aa, synthetic construct
MILDTDYITEDGKPVIRIFKKENGEFKIEYDRTFEPYFYALLKDDSAIEEVKKITAERHGTVVTVKRVEKVQKKFLGRPVEVWKLYFTHPQDKDAIRDKIREHPAVIDIYEYDIPFAKRYLIDKGLVPMEGDEELKMLAFDIETLYHEGEEFAEGPILMISYADEEGARVITWKNVDLPYVDVVSTEREMIKRFLRVVKEKDPDVLITYNGDNFDFAYLKKRCEKLGINFALGRDGSEPKIQRMGDRFAVEVKGRIHFDLYPVIRRTINLPTYTLEAVYEAVFGQPKEKVYAEEITTAWETGENLERVARYSMEDAKVTYELGKEFLPMEAQLSRLIGQSLWDVSRSSTGNLVEWFLLRKAYERNELAPNKPDEKELARRRQSYEGGYVKEPERGLWENIVYLDFRSLYPSIIITHNVSPDTLNREGCKEYDVAPQVGHRFCKDFPGFIPSLLGDLLEERQKIKKKMKATIDPIERKLLDYRQRAIKILANSYYGYYGYARARWYCKECAESVTAWGREYITMTIKEIEEKYGFKVIYSDTDGFFATIPGADAETVKKKAMEFLKYINAKLPGALELEYEGFYKRGFFVTKKKYAVIDEEGKITTRGLEIVRRDWSEIAKETQARVLEALLKDGDVEKAVRIVKEVTEKLSKYEVPPEKLVIHEQITRDLKDYKATGPHVAVAKRLAARGVKIRPGTVISYIVLKGSGRIGDRAIPFDEFDPTKHKYDAEYYIENQVLPAVERILRAFGYRKEDLRYQKTRQVGLSAWLKPKGT

SEQ ID NO: 3401 - protein, 774 aa, synthetic construct
MILDTDYITEDGKPVIRIFKKENGEFKIEYDRTFEPYFYALLKDDSAIEEVKKITAERHGTVVTVKRVEKVQKKFLGRPVEVWKLYFTHPQDKDAIRDKIREHPAVIDIYEYDIPFMKRYLIDKGLVPMEGDEELKMLAFDIETLYHEGEEFAEGPILMISYADEEGARVITWKNVDLPYVDVVSTEREMIKRFLRVVKEKDPDVLITYNGDNFDFAYLKKRCEKLGINFALGRDGSEPKIQRMGDRFAVEVKGRIHFDLYPVIRRTINLPTYTLEAVYEAVFGQPKEKVYAEEITTAWETGENLERVARYSMEDAKVTYELGKEFLPMEAQLSRLIGQSLWDVSRSSTGNLVEWFLLRKAYERNELAPNKPDEKELARRRQSYEGGYVKEPERGLWENIVYLDFRSLYPSIIITHNVSPDTLNREGCKEYDVAPQVGHRFCKDFPGFIPSLLGDLLEERQKIKKKMKATIDPIERKLLDYRQRAIKILANSYYGYYGYARARWYCKECAESVTAWGREYITMTIKEIEEKYGFKVIYSDTDGFFATIPGADAETVKKKAMEFLKYINAKLPGALELEYEGFYKRGFFVTKKKYAVIDEEGKITTRGLEIVRRDWSEIAKETQARVLEALLKDGDVEKAVRIVKEVTEKLSKYEVPPEKLVIHEQITRDLKDYKATGPHVAVAKRLAARGVKIRPGTVISYIVLKGSGRIGDRAIPFDEFDPTKHKYDAEYYIENQVLPAVERILRAFGYRKEDLRYQKTRQVGLSAWLKPKGT

SEQ ID NO: 3402 - protein, 774 aa, synthetic construct
MILDTDYITEDGKPVIRIFKKENGEFKIEYDRTFEPYFYALLKDDSAIEEVKKITAERHGTVVTVKRVEKVQKKFLGRPVEVWKLYFTHPQDKDAIRDKIREHPAVIDIYEYDIPFMKQYLIDKGLVPMEGDEELKMLAFDIETLYHEGEEFAEGPILMISYADEEGARVITWKNVDLPYVDVVSTEREMIKRFLRVVKEKDPDVLITYNGDNFDFAYLKKRCEKLGINFALGRDGSEPKIQRMGDRFAVEVKGRIHFDLYPVIRRTINLPTYTLEAVYEAVFGQPKEKVYAEEITTAWETGENLERVARYSMEDAKVTYELGKEFLPMEAQLSRLIGQSLWDVSRSSTGNLVEWFLLRKAYERNELAPNKPDEKELARRRQSYEGGYVKEPERGLWENIVYLDFRSLYPSIIITHNVSPDTLNREGCKEYDVAPQVGHRFCKDFPGFIPSLLGDLLEERQKIKKKMKATIDPIERKLLDYRQRAIKILANSYYGYYGYARARWYCKECAESVTAWGREYITMTIKEIEEKYGFKVIYSDTDGFFATIPGADAETVKKKAMEFLKYINAKLPGALELEYEGFYKRGFFVTKKKYAVIDEEGKITTRGLEIVRRDWSEIAKETQARVLEALLKDGDVEKAVRIVKEVTEKLSKYEVPPEKLVIHEQITRDLKDYKATGPHVAVAKRLAARGVKIRPGTVISYIVLKGSGRIGDRAIPFDEFDPTKHKYDAEYYIENQVLPAVERILRAFGYRKEDLRYQKTRQVGLSAWLKPKGT

SEQ ID NO: 3403 - protein, 774 aa, synthetic construct
MILDTDYITEDGKPVIRIFKKENGEFKIEYDRTFEPYFYALLKDDSAIEEVKKITAERHGTVVTVKRVEKVQKKFLGRPVEVWKLYFTHPQDKDAIRDKIREHPAVIDIYEYDIPFMKQYLIIKGLVPMEGDEELKMLAFDIETLYHEGEEFAEGPILMISYADEEGARVITWKNVDLPYVDVVSTEREMIKRFLRVVKEKDPDVLITYNGDNFDFAYLKKRCEKLGINFALGRDGSEPKIQRMGDRFAVEVKGRIHFDLYPVIRRTINLPTYTLEAVYEAVFGQPKEKVYAEEITTAWETGENLERVARYSMEDAKVTYELGKEFLPMEAQLSRLIGQSLWDVSRSSTGNLVEWFLLRKAYERNELAPNKPDEKELARRRQSYEGGYVKEPERGLWENIVYLDFRSLYPSIIITHNVSPDTLNREGCKEYDVAPQVGHRFCKDFPGFIPSLLGDLLEERQKIKKKMKATIDPIERKLLDYRQRAIKILANSYYGYYGYARARWYCKECAESVTAWGREYITMTIKEIEEKYGFKVIYSDTDGFFATIPGADAETVKKKAMEFLKYINAKLPGALELEYEGFYKRGFFVTKKKYAVIDEEGKITTRGLEIVRRDWSEIAKETQARVLEALLKDGDVEKAVRIVKEVTEKLSKYEVPPEKLVIHEQITRDLKDYKATGPHVAVAKRLAARGVKIRPGTVISYIVLKGSGRIGDRAIPFDEFDPTKHKYDAEYYIENQVLPAVERILRAFGYRKEDLRYQKTRQVGLSAWLKPKGT

SEQ ID NO: 3404 - protein, 774 aa, synthetic construct
MILDTDYITEDGKPVIRIFKKENGEFKIEYDRTFEPYFYALLKDDSAIEEVKKITAERHGTVVTVKRVEKVQKKFLGRPVEVWKLYFTHPQDKDAIRDKIREHPAVIDIYEYDIPPAKRYLIDKGLVPMEGDEELKMLAFDIETLYHEGEEFAEGPILMISYADEEGARVITWKNVDLPYVDVVSTEREMIKRFLRVVKEKDPDVLITYNGDNFDFAYLKKRCEKLGINFALGRDGSEPKIQRMGDRFAVEVKGRIHFDLYPVIRRTINLPTYTLEAVYEAVFGQPKEKVYAEEITTAWETGENLERVARYSMEDAKVTYELGKEFLPMEAQLSRLIGQSLWDVSRSSTGNLVEWFLLRKAYERNELAPNKPDEKELARRRQSYEGGYVKEPERGLWENIVYLDFRSLYPSIIITHNVSPDTLNREGCKEYDVAPQVGHRFCKDFPGFIPSLLGDLLEERQKIKKKMKATIDPIERKLLDYRQRAIKILANSYYGYYGYARARWYCKECAESVTAWGREYITMTIKEIEEKYGFKVIYSDTDGFFATIPGADAETVKKKAMEFLKYINAKLPGALELEYEGFYKRGFFVTKKKYAVIDEEGKITTRGLEIVRRDWSEIAKETQARVLEALLKDGDVEKAVRIVKEVTEKLSKYEVPPEKLVIHEQITRDLKDYKATGPHVAVAKRLAARGVKIRPGTVISYIVLKGSGRIGDRAIPFDEFDPTKHKYDAEYYIENQVLPAVERILRAFGYRKEDLRYQKTRQVGLSAWLKPKGT

SEQ ID NO: 3405 - protein, 774 aa, synthetic construct
MILDTDYITEDGKPVIRIFKKENGEFKIEYDRTFEPYFYALLKDDSAIEEVKKITAERHGTVVTVKRVEKVQKKFLGRPVEVWKLYFTHPQDKDAIRDKIREHPAVIDIYEYDIPPMKRYLIDKGLVPMEGDEELKMLAFDIETLYHEGEEFAEGPILMISYADEEGARVITWKNVDLPYVDVVSTEREMIKRFLRVVKEKDPDVLITYNGDNFDFAYLKKRCEKLGINFALGRDGSEPKIQRMGDRFAVEVKGRIHFDLYPVIRRTINLPTYTLEAVYEAVFGQPKEKVYAEEITTAWETGENLERVARYSMEDAKVTYELGKEFLPMEAQLSRLIGQSLWDVSRSSTGNLVEWFLLRKAYERNELAPNKPDEKELARRRQSYEGGYVKEPERGLWENIVYLDFRSLYPSIIITHNVSPDTLNREGCKEYDVAPQVGHRFCKDFPGFIPSLLGDLLEERQKIKKKMKATIDPIERKLLDYRQRAIKILANSYYGYYGYARARWYCKECAESVTAWGREYITMTIKEIEEKYGFKVIYSDTDGFFATIPGADAETVKKKAMEFLKYINAKLPGALELEYEGFYKRGFFVTKKKYAVIDEEGKITTRGLEIVRRDWSEIAKETQARVLEALLKDGDVEKAVRIVKEVTEKLSKYEVPPEKLVIHEQITRDLKDYKATGPHVAVAKRLAARGVKIRPGTVISYIVLKGSGRIGDRAIPFDEFDPTKHKYDAEYYIENQVLPAVERILRAFGYRKEDLRYQKTRQVGLSAWLKPKGT

SEQ ID NO: 3406 - protein, 774 aa, synthetic construct
MILDTDYITEDGKPVIRIFKKENGEFKIEYDRTFEPYFYALLKDDSAIEEVKKITAERHGTVVTVKRVEKVQKKFLGRPVEVWKLYFTHPQDKDAIFDKIREHPAVIDIYEYDIPFMKRYLIDKGLVPMEGDEELKMLAFDIETLYHEGEEFAEGPILMISYADEEGARVITWKNVDLPYVDVVSTEREMIKRFLRVVKEKDPDVLITYNGDNFDFAYLKKRCEKLGINFALGRDGSEPKIQRMGDRFAVEVKGRIHFDLYPVIRRTINLPTYTLEAVYEAVFGQPKEKVYAEEITTAWETGENLERVARYSMEDAKVTYELGKEFLPMEAQLSRLIGQSLWDVSRSSTGNLVEWFLLRKAYERNELAPNKPDEKELARRRQSYEGGYVKEPERGLWENIVYLDFRSLYPSIIITHNVSPDTLNREGCKEYDVAPQVGHRFCKDFPGFIPSLLGDLLEERQKIKKKMKATIDPIERKLLDYRQRAIKILANSYYGYYGYARARWYCKECAESVTAWGREYITMTIKEIEEKYGFKVIYSDTDGFFATIPGADAETVKKKAMEFLKYINAKLPGALELEYEGFYKRGFFVTKKKYAVIDEEGKITTRGLEIVRRDWSEIAKETQARVLEALLKDGDVEKAVRIVKEVTEKLSKYEVPPEKLVIHEQITRDLKDYKATGPHVAVAKRLAARGVKIRPGTVISYIVLKGSGRIGDRAIPFDEFDPTKHKYDAEYYIENQVLPAVERILRAFGYRKEDLRYQKTRQVGLSAWLKPKGT

SEQ ID NO: 3407 - protein, 774 aa, synthetic construct
MILDTDYITEDGKPVIRIFKKENGEFKIEYDRTFEPYFYALLKDDSAIEEVKKITAERHGTVVTVKRVEKVQKKFLGRPVEVWKLYFTHPQDKPAIFDKIREHPAVIDIYEYDIPFMKRYLIDKGLVPMEGDEELKMLAFDIETLYHEGEEFAEGPILMISYADEEGARVITWKNVDLPYVDVVSTEREMIKRFLRVVKEKDPDVLITYNGDNFDFAYLKKRCEKLGINFALGRDGSEPKIQRMGDRFAVEVKGRIHFDLYPVIRRTINLPTYTLEAVYEAVFGQPKEKVYAEEITTAWETGENLERVARYSMEDAKVTYELGKEFLPMEAQLSRLIGQSLWDVSRSSTGNLVEWFLLRKAYERNELAPNKPDEKELARRRQSYEGGYVKEPERGLWENIVYLDFRSLYPSIIITHNVSPDTLNREGCKEYDVAPQVGHRFCKDFPGFIPSLLGDLLEERQKIKKKMKATIDPIERKLLDYRQRAIKILANSYYGYYGYARARWYCKECAESVTAWGREYITMTIKEIEEKYGFKVIYSDTDGFFATIPGADAETVKKKAMEFLKYINAKLPGALELEYEGFYKRGFFVTKKKYAVIDEEGKITTRGLEIVRRDWSEIAKETQARVLEALLKDGDVEKAVRIVKEVTEKLSKYEVPPEKLVIHEQITRDLKDYKATGPHVAVAKRLAARGVKIRPGTVISYIVLKGSGRIGDRAIPFDEFDPTKHKYDAEYYIENQVLPAVERILRAFGYRKEDLRYQKTRQVGLSAWLKPKGT

SEQ ID NO: 3408 - protein, 774 aa, synthetic construct
MILDTDYITEDGKPVIRIFKKENGEFKIEYDRTFEPYFYALLKDDSAIEEVKKITAERHGTVVTVKRVEKVQKKFLGRPVEVWKLYFTHPQDKPAIFDKIREHPAVIDIYEYDIPFMKRYLIIKGLVPMEGDEELKMLAFDIETLYHEGEEFAEGPILMISYADEEGARVITWKNVDLPYVDVVSTEREMIKRFLRVVKEKDPDVLITYNGDNFDFAYLKKRCEKLGINFALGRDGSEPKIQRMGDRFAVEVKGRIHFDLYPVIRRTINLPTYTLEAVYEAVFGQPKEKVYAEEITTAWETGENLERVARYSMEDAKVTYELGKEFLPMEAQLSRLIGQSLWDVSRSSTGNLVEWFLLRKAYERNELAPNKPDEKELARRRQSYEGGYVKEPERGLWENIVYLDFRSLYPSIIITHNVSPDTLNREGCKEYDVAPQVGHRFCKDFPGFIPSLLGDLLEERQKIKKKMKATIDPIERKLLDYRQRAIKILANSYYGYYGYARARWYCKECAESVTAWGREYITMTIKEIEEKYGFKVIYSDTDGFFATIPGADAETVKKKAMEFLKYINAKLPGALELEYEGFYKRGFFVTKKKYAVIDEEGKITTRGLEIVRRDWSEIAKETQARVLEALLKDGDVEKAVRIVKEVTEKLSKYEVPPEKLVIHEQITRDLKDYKATGPHVAVAKRLAARGVKIRPGTVISYIVLKGSGRIGDRAIPFDEFDPTKHKYDAEYYIENQVLPAVERILRAFGYRKEDLRYQKTRQVGLSAWLKPKGT

SEQ ID NO: 3409 - protein, 774 aa, synthetic construct
MILDTDYITEDGKPVIRIFKKENGEFKIEYDRTFEPYFYALLKDDSAIEEVKKITAERHGTVVTVKRVEKVQKKFLGRPVEVWKLYFTHPQDKPAIFDKIREHPAVIDIYEYDIPFMKQYLIDKGLVPMEGDEELKMLAFDIETLYHEGEEFAEGPILMISYADEEGARVITWKNVDLPYVDVVSTEREMIKRFLRVVKEKDPDVLITYNGDNFDFAYLKKRCEKLGINFALGRDGSEPKIQRMGDRFAVEVKGRIHFDLYPVIRRTINLPTYTLEAVYEAVFGQPKEKVYAEEITTAWETGENLERVARYSMEDAKVTYELGKEFLPMEAQLSRLIGQSLWDVSRSSTGNLVEWFLLRKAYERNELAPNKPDEKELARRRQSYEGGYVKEPERGLWENIVYLDFRSLYPSIIITHNVSPDTLNREGCKEYDVAPQVGHRFCKDFPGFIPSLLGDLLEERQKIKKKMKATIDPIERKLLDYRQRAIKILANSYYGYYGYARARWYCKECAESVTAWGREYITMTIKEIEEKYGFKVIYSDTDGFFATIPGADAETVKKKAMEFLKYINAKLPGALELEYEGFYKRGFFVTKKKYAVIDEEGKITTRGLEIVRRDWSEIAKETQARVLEALLKDGDVEKAVRIVKEVTEKLSKYEVPPEKLVIHEQITRDLKDYKATGPHVAVAKRLAARGVKIRPGTVISYIVLKGSGRIGDRAIPFDEFDPTKHKYDAEYYIENQVLPAVERILRAFGYRKEDLRYQKTRQVGLSAWLKPKGT

SEQ ID NO: 3410 - protein, 774 aa, synthetic construct
MILDTDYITEDGKPVIRIFKKENGEFKIEYDRTFEPYFYALLKDDSAIEEVKKITAERHGTVVTVKRVEKVQKKFLGRPVEVWKLYFTHPQDKPAIFDKIREHPAVIDIYEYDIPFMKQYLIIKGLVPMEGDEELKMLAFDIETLYHEGEEFAEGPILMISYADEEGARVITWKNVDLPYVDVVSTEREMIKRFLRVVKEKDPDVLITYNGDNFDFAYLKKRCEKLGINFALGRDGSEPKIQRMGDRFAVEVKGRIHFDLYPVIRRTINLPTYTLEAVYEAVFGQPKEKVYAEEITTAWETGENLERVARYSMEDAKVTYELGKEFLPMEAQLSRLIGQSLWDVSRSSTGNLVEWFLLRKAYERNELAPNKPDEKELARRRQSYEGGYVKEPERGLWENIVYLDFRSLYPSIIITHNVSPDTLNREGCKEYDVAPQVGHRFCKDFPGFIPSLLGDLLEERQKIKKKMKATIDPIERKLLDYRQRAIKILANSYYGYYGYARARWYCKECAESVTAWGREYITMTIKEIEEKYGFKVIYSDTDGFFATIPGADAETVKKKAMEFLKYINAKLPGALELEYEGFYKRGFFVTKKKYAVIDEEGKITTRGLEIVRRDWSEIAKETQARVLEALLKDGDVEKAVRIVKEVTEKLSKYEVPPEKLVIHEQITRDLKDYKATGPHVAVAKRLAARGVKIRPGTVISYIVLKGSGRIGDRAIPFDEFDPTKHKYDAEYYIENQVLPAVERILRAFGYRKEDLRYQKTRQVGLSAWLKPKGT

SEQ ID NO: 3411 - protein, 774 aa, synthetic construct
MILDTDYITEDGKPVIRIFKKENGEFKIEYDRTFEPYFYALLKDDSAIEEVKKITAERHGTVVTVKRVEKVQKKFLGRPVEVWKLYFTHPQDKPAIFDKIREHPAVIDIYEYDIPPAKRYLIDKGLVPMEGDEELKMLAFDIETLYHEGEEFAEGPILMISYADEEGARVITWKNVDLPYVDVVSTEREMIKRFLRVVKEKDPDVLITYNGDNFDFAYLKKRCEKLGINFALGRDGSEPKIQRMGDRFAVEVKGRIHFDLYPVIRRTINLPTYTLEAVYEAVFGQPKEKVYAEEITTAWETGENLERVARYSMEDAKVTYELGKEFLPMEAQLSRLIGQSLWDVSRSSTGNLVEWFLLRKAYERNELAPNKPDEKELARRRQSYEGGYVKEPERGLWENIVYLDFRSLYPSIIITHNVSPDTLNREGCKEYDVAPQVGHRFCKDFPGFIPSLLGDLLEERQKIKKKMKATIDPIERKLLDYRQRAIKILANSYYGYYGYARARWYCKECAESVTAWGREYITMTIKEIEEKYGFKVIYSDTDGFFATIPGADAETVKKKAMEFLKYINAKLPGALELEYEGFYKRGFFVTKKKYAVIDEEGKITTRGLEIVRRDWSEIAKETQARVLEALLKDGDVEKAVRIVKEVTEKLSKYEVPPEKLVIHEQITRDLKDYKATGPHVAVAKRLAARGVKIRPGTVISYIVLKGSGRIGDRAIPFDEFDPTKHKYDAEYYIENQVLPAVERILRAFGYRKEDLRYQKTRQVGLSAWLKPKGT

SEQ ID NO: 3412 - protein, 774 aa, synthetic construct
MILDTDYITEDGKPVIRIFKKENGEFKIEYDRTFEPYFYALLKDDSAIEEVKKITAERHGTVVTVKRVEKVQKKFLGRPVEVWKLYFTHPQDKPAIFDKIREHPAVIDIYEYDIPPMKRYLIDKGLVPMEGDEELKMLAFDIETLYHEGEEFAEGPILMISYADEEGARVITWKNVDLPYVDVVSTEREMIKRFLRVVKEKDPDVLITYNGDNFDFAYLKKRCEKLGINFALGRDGSEPKIQRMGDRFAVEVKGRIHFDLYPVIRRTINLPTYTLEAVYEAVFGQPKEKVYAEEITTAWETGENLERVARYSMEDAKVTYELGKEFLPMEAQLSRLIGQSLWDVSRSSTGNLVEWFLLRKAYERNELAPNKPDEKELARRRQSYEGGYVKEPERGLWENIVYLDFRSLYPSIIITHNVSPDTLNREGCKEYDVAPQVGHRFCKDFPGFIPSLLGDLLEERQKIKKKMKATIDPIERKLLDYRQRAIKILANSYYGYYGYARARWYCKECAESVTAWGREYITMTIKEIEEKYGFKVIYSDTDGFFATIPGADAETVKKKAMEFLKYINAKLPGALELEYEGFYKRGFFVTKKKYAVIDEEGKITTRGLEIVRRDWSEIAKETQARVLEALLKDGDVEKAVRIVKEVTEKLSKYEVPPEKLVIHEQITRDLKDYKATGPHVAVAKRLAARGVKIRPGTVISYIVLKGSGRIGDRAIPFDEFDPTKHKYDAEYYIENQVLPAVERILRAFGYRKEDLRYQKTRQVGLSAWLKPKGT

SEQ ID NO: 3413 - protein, 774 aa, synthetic construct
MILDTDYITEDGKPVIRIFKKENGEFKIEYDRTFEPYFYALLKDDSAIEEVKKITAERHGTVVTVKRVEKVQKKFLGRPVEVWKLYFTHPQDKPAIRDKIREHPAVIDIYEYDIPFAKQYLIIKGLVPMEGDEELKMLAFDIETLYHEGEEFAEGPILMISYADEEGARVITWKNVDLPYVDVVSTEREMIKRFLRVVKEKDPDVLITYNGDNFDFAYLKKRCEKLGINFALGRDGSEPKIQRMGDRFAVEVKGRIHFDLYPVIRRTINLPTYTLEAVYEAVFGQPKEKVYAEEITTAWETGENLERVARYSMEDAKVTYELGKEFLPMEAQLSRLIGQSLWDVSRSSTGNLVEWFLLRKAYERNELAPNKPDEKELARRRQSYEGGYVKEPERGLWENIVYLDFRSLYPSIIITHNVSPDTLNREGCKEYDVAPQVGHRFCKDFPGFIPSLLGDLLEERQKIKKKMKATIDPIERKLLDYRQRAIKILANSYYGYYGYARARWYCKECAESVTAWGREYITMTIKEIEEKYGFKVIYSDTDGFFATIPGADAETVKKKAMEFLKYINAKLPGALELEYEGFYKRGFFVTKKKYAVIDEEGKITTRGLEIVRRDWSEIAKETQARVLEALLKDGDVEKAVRIVKEVTEKLSKYEVPPEKLVIHEQITRDLKDYKATGPHVAVAKRLAARGVKIRPGTVISYIVLKGSGRIGDRAIPFDEFDPTKHKYDAEYYIENQVLPAVERILRAFGYRKEDLRYQKTRQVGLSAWLKPKGT

SEQ ID NO: 3414 - protein, 774 aa, synthetic construct
MILDTDDITEDGKPVIRIFKKENGEFKIEYDRTFEPYFYALLKDDSAIEEVKKITAERHGTVVTVKRVEKVQKKFLGRPVEVWKLYFTHFQDVPAIRDKIREHPAVIDIYEYDIPPAKRYLIDKGLVPMEGDEELKMLAFDIETLYHEGEEFAEGPILMISYADEEGARVITWKNVDLPYVDVVSTEREMIKRFLRVVKEKDPDVLITYNGDNFDFAYLKKRCEKLGINFALGRDGSEPKIQRMGDRFAVEVKGRIHFDLYPVIRRTINLPTYTLEAVYEAVFGQPKEKVYAEEITTAWETGENLERVARYSMEDAKVTYELGKEFLPMEAQLSRLIGQSLWDVSRSSTGNLVEWFLLRKAYERNELAPNKPDEKELARRRQSYEGGYVKEPERGLWENIVYLDFRSLYPSIIITHNVSPDTLNREGCKEYDVAPQVGHRFCKDFPGFIPSLLGDLLEERQKIKKKMKATIDPIERKLLDYRQRAIKILANSYYGYYGYARARWYCKECAESVTAWGREYITMTIKEIEEKYGFKVIYSDTDGFFATIPGADAETVKKKAMEFLKYINAKLPGALELEYEGFYKRGFFVTKKKYAVIDEEGKITTRGLEIVRRDWSEIAKETQARVLEALLKDGDVEKAVRIVKEVTEKLSKYEVPPEKLVIHEQITRDLKDYKATGPHVAVAKRLAARGVKIRPGTVISYIVLKGSGRIGDRAIPFDEFDPTKHKYDAEYYIENQVLPAVERILRAFGYRKEDLRYQKTRQVGLSAWLKPKGT

SEQ ID NO: 3415 - protein, 774 aa, synthetic construct
MILDTDYITEDGKPVIRIFKKENGEFKIEYDRTFEPDFYALLKDDSAIEEVKKITAERHGTVVTVKRVEKVQKKFLGRPVEVWKLYFTHPQDVPAIRDKIREHPAVIDIYEYDIPFMKRYLIIKGLVPMEGDEELKMLAFDIETLYHEGEEFAEGPILMISYADEEGARVITWKNVDLPYVDVVSTEREMIKRFLRVVKEKDPDVLITYNGDNFDFAYLKKRCEKLGINFALGRDGSEPKIQRMGDRFAVEVKGRIHFDLYPVIRRTINLPTYTLEAVYEAVFGQPKEKVYAEEITTAWETGENLERVARYSMEDAKVTYELGKEFLPMEAQLSRLIGQSLWDVSRSSTGNLVEWFLLRKAYERNELAPNKPDEKELARRRQSYEGGYVKEPERGLWENIVYLDFRSLYPSIIITHNVSPDTLNREGCKEYDVAPQVGHRFCKDFPGFIPSLLGDLLEERQKIKKKMKATIDPIERKLLDYRQRAIKILANSYYGYYGYARARWYCKECAESVTAWGREYITMTIKEIEEKYGFKVIYSDTDGFFATIPGADAETVKKKAMEFLKYINAKLPGALELEYEGFYKRGFFVTKKKYAVIDEEGKITTRGLEIVRRDWSEIAKETQARVLEALLKDGDVEKAVRIVKEVTEKLSKYEVPPEKLVIHEQITRDLKDYKATGPHVAVAKRLAARGVKIRPGTVISYIVLKGSGRIGDRAIPFDEFDPTKHKYDAEYYIENQVLPAVERILRAFGYRKEDLRYQKTRQVGLSAWLKPKGT

SEQ ID NO: 3416 - protein, 774 aa, synthetic construct
MILDTDYITEDGKPVIRIFKKENGEFKIEYDRTFEPDFYALLKDDSAIEEVKKITAERHGTVVTVKRVEKVQKKFLGRPVEVWKLYFTHPQDVPAIRDKIREHPAVIDIYEYDIPPMKRYLIIKGLVPMEGDEELKMLAFDIETLYHEGEEFAEGPILMISYADEEGARVITWKNVDLPYVDVVSTEREMIKRFLRVVKEKDPDVLITYNGDNFDFAYLKKRCEKLGINFALGRDGSEPKIQRMGDRFAVEVKGRIHFDLYPVIRRTINLPTYTLEAVYEAVFGQPKEKVYAEEITTAWETGENLERVARYSMEDAKVTYELGKEFLPMEAQLSRLIGQSLWDVSRSSTGNLVEWFLLRKAYERNELAPNKPDEKELARRRQSYEGGYVKEPERGLWENIVYLDFRSLYPSIIITHNVSPDTLNREGCKEYDVAPQVGHRFCKDFPGFIPSLLGDLLEERQKIKKKMKATIDPIERKLLDYRQRAIKILANSYYGYYGYARARWYCKECAESVTAWGREYITMTIKEIEEKYGFKVIYSDTDGFFATIPGADAETVKKKAMEFLKYINAKLPGALELEYEGFYKRGFFVTKKKYAVIDEEGKITTRGLEIVRRDWSEIAKETQARVLEALLKDGDVEKAVRIVKEVTEKLSKYEVPPEKLVIHEQITRDLKDYKATGPHVAVAKRLAARGVKIRPGTVISYIVLKGSGRIGDRAIPFDEFDPTKHKYDAEYYIENQVLPAVERILRAFGYRKEDLRYQKTRQVGLSAWLKPKGT

SEQ ID NO: 3417 - protein, 774 aa, synthetic construct
MILDTDYITEDGKPVIRIFKKENGEFKIEYDRTFEPDFYALLKDDSAIEEVKKITAERHGTVVTVKRVEKVQKKFLGRPVEVWKLYFTHFQDVPAIRDKIREHPAVIDIYEYDIPPMKRYLIIKGLVPMEGDEELKMLAFDIETLYHEGEEFAEGPILMISYADEEGARVITWKNVDLPYVDVVSTEREMIKRFLRVVKEKDPDVLITYNGDNFDFAYLKKRCEKLGINFALGRDGSEPKIQRMGDRFAVEVKGRIHFDLYPVIRRTINLPTYTLEAVYEAVFGQPKEKVYAEEITTAWETGENLERVARYSMEDAKVTYELGKEFLPMEAQLSRLIGQSLWDVSRSSTGNLVEWFLLRKAYERNELAPNKPDEKELARRRQSYEGGYVKEPERGLWENIVYLDFRSLYPSIIITHNVSPDTLNREGCKEYDVAPQVGHRFCKDFPGFIPSLLGDLLEERQKIKKKMKATIDPIERKLLDYRQRAIKILANSYYGYYGYARARWYCKECAESVTAWGREYITMTIKEIEEKYGFKVIYSDTDGFFATIPGADAETVKKKAMEFLKYINAKLPGALELEYEGFYKRGFFVTKKKYAVIDEEGKITTRGLEIVRRDWSEIAKETQARVLEALLKDGDVEKAVRIVKEVTEKLSKYEVPPEKLVIHEQITRDLKDYKATGPHVAVAKRLAARGVKIRPGTVISYIVLKGSGRIGDRAIPFDEFDPTKHKYDAEYYIENQVLPAVERILRAFGYRKEDLRYQKTRQVGLSAWLKPKGT

SEQ ID NO: 3418 - protein, 774 aa, synthetic construct
MILDTDYITEDGKPVIRIFKKENGEFKIEYDRTFEPDFYALLKDDSAIEEVKKITAERHGTVVTVKRVEKVQKKFLGRPVEVWKLYFTHPQDVPAIFDKIREHPAVIDIYEYDIPFMKRYLIIKGLVPMEGDEELKMLAFDIETLYHEGEEFAEGPILMISYADEEGARVITWKNVDLPYVDVVSTEREMIKRFLRVVKEKDPDVLITYNGDNFDFAYLKKRCEKLGINFALGRDGSEPKIQRMGDRFAVEVKGRIHFDLYPVIRRTINLPTYTLEAVYEAVFGQPKEKVYAEEITTAWETGENLERVARYSMEDAKVTYELGKEFLPMEAQLSRLIGQSLWDVSRSSTGNLVEWFLLRKAYERNELAPNKPDEKELARRRQSYEGGYVKEPERGLWENIVYLDFRSLYPSIIITHNVSPDTLNREGCKEYDVAPQVGHRFCKDFPGFIPSLLGDLLEERQKIKKKMKATIDPIERKLLDYRQRAIKILANSYYGYYGYARARWYCKECAESVTAWGREYITMTIKEIEEKYGFKVIYSDTDGFFATIPGADAETVKKKAMEFLKYINAKLPGALELEYEGFYKRGFFVTKKKYAVIDEEGKITTRGLEIVRRDWSEIAKETQARVLEALLKDGDVEKAVRIVKEVTEKLSKYEVPPEKLVIHEQITRDLKDYKATGPHVAVAKRLAARGVKIRPGTVISYIVLKGSGRIGDRAIPFDEFDPTKHKYDAEYYIENQVLPAVERILRAFGYRKEDLRYQKTRQVGLSAWLKPKGT

SEQ ID NO: 3419 - protein, 64 aa, synthetic construct
MATVKFKYKGEEKEVDISKIKKVWRVGKMISFTYDEGGGKTGRGAVSEKDAPKELLQMLEKQKK
